(19) United States
(12) Patent Application Publication
(10) Pub. No.: US 2020/0354734 A1
(43) Pub. Date: Nov. 12, 2020

(54) NEW STRATEGIES FOR PRECISION GENOME EDITING

(71) Applicant: KWS SAAT SE & Co. KGaA, Einbeck (DE)

(72) Inventors: Markus NIESSEN, Laatzen (DE); Aaron HUMMEL, St. Louis, MO (US); Erik JONGEDIJK, Lokeren (BE); Zarir VAGHCHHIPAWALA, Ballwin, MO (US); Fridtjof WELTMEIER, Einbeck (DE); René GLENZ, Northeim (DE)

(73) Assignee: KWS SAAT SE & Co. KGaA, Einbeck (DE)

(21) Appl. No.: 16/760,100

(22) PCT Filed: Oct. 30, 2018
(86) PCT No.: PCT/EP2018/079718

§ 371 Date: Apr. 29, 2020

Related U.S. Application Data
(60) Provisional application No. 62/578,621, filed on Oct. 30, 2017.

(51) Int. Cl. C12N 15/82; C12N 15/90

(52) U.S. Cl. CPC C12N 15/8213; C12N 15/902

(57) ABSTRACT

The present invention relates to improved methods for precision genome editing (GE), preferably in eukaryotic cells, and particularly to methods for GE in cells with specifically altered expression of Polymerase theta and altered characteristics of at least one further enzyme involved in a non-homologous end-joining (NHEJ) DNA repair pathway. Further provided are cellular systems and tools related to the methods provided. Specifically, methods are provided, wherein Polymerase theta and NHEJ blockage and/or GE are performed in a transient way so that the endogenous Polymerase theta and cellular NHEJ machinery is easily reactivated after a targeted edit, and/or without permanent integration of certain editing tools.

### TECHNICAL FIELD

[0001] The present invention relates to improved methods for precision genome editing (GE), preferably in eukaryotic cells, and particularly to methods for GE in cells with specifically altered expression of Polymerase theta and altered characteristics of at least one further enzyme involved in a non-homologous end-joining (NHEJ) DNA repair pathway. The methods allow a synchronized provision of an at least partially inactivated Polymerase theta and at least one further NHEJ enzyme together with the provision of GE tools in the same cell at the time point a targeted edit is introduced to provide a significantly improved predictability and precision of the GE outcome. Further provided are cellular systems and tools related to the methods provided. Specifically, methods are provided, wherein Polymerase theta and NHEJ blockage and/or GE are performed in a transient way so that the endogenous Polymerase theta and cellular NHEJ machinery is easily reactivated after a targeted edit, and/or without permanent integration of certain editing tools.

### BACKGROUND OF THE INVENTION

[0002] The ability to precisely modify genetic material in eukaryotic cells enables a wide range of high value applications in medical, pharmaceutical, agricultural, basic research and other technical fields. Fundamentally, genome engineering or gene editing (GE) provides this capability by introducing predefined genetic variation at specific locations in eukaryotic as well as prokaryotic genomes. Recent achievements in efficient GE for targeted mutagenesis, editing, replacements, or insertions, are dependent on the ability to introduce genomic single- or double-strand breaks (DSBs) at specific locations in a genome of interest.

[0003] In eukaryotic cells, genome integrity is ensured by robust and partially redundant mechanisms for repairing DNA DSBs caused by environmental stresses and errors of cellular DNA processing machinery. In most eukaryotic cells and at most stages of the respective cell cycle, the non-homologous end-joining (NHEJ) DNA repair pathway is the highly dominant form of repair. A second pathway uses homologous recombination (HR) of similar DNA sequences to repair DSBs. This pathway can usually be used in the S and G2 stages of the cell cycle by templating from the duplicated homologous region of a paired chromosome to precisely repair the DSB. However, an artificially-provided repair template (RT) with homology to the target can also be used to repair the DSB, in a process known as homology-directed repair (HDR) or gene targeting. By this strategy it is possible to introduce very precise, targeted changes in the genomes of eukaryotic cells.

[0004] Early gene targeting studies in plants revealed frequencies of homologous recombination that were so low it was effectively impossible to practice gene editing for crop improvement. Site-specific nucleases (SSNs), which can be directed to a specific target sequence and there cause a DSB, increase gene targeting frequencies by 2-3 orders of magnitude when co-delivered together with a DNA RT (Puchta et al., Proc. Natl. Acad. Sci. USA 93:5055-5060, 1996). However, GE in plants is still hindered by low frequency of HDR repairs compared to repairs by NHEJ which can create insertions or deletions (INDELs) in the SSN target, thereby disrupting further cutting and rendering the target in a particular cell unusable for gene targeting.

[0005] An aspect to be critically considered for GE is thus the nature of the repair mechanism induced after the cleavage of a genomic target site of interest, as DSBs, or any DNA lesions in general are detrimental for the integrity of a genome. It is thus of outstanding importance that the cellular machinery provides mechanisms of double-strand break (DSB) repair in the natural environment. Cells possess intrinsic mechanisms to attempt to repair any double- or single-stranded DNA damage. DSB repair mechanisms have been divided into two major basic types, NHEJ and HR in general are usually called HDR.

[0006] NHEJ is the dominant nuclear response in animals and plants which does not require homologous sequences, but is often error-prone and thus potentially mutagenic (Wyman C., Kanaar R. “DNA double-strand break repair: all's well that ends well”, Annu. Rev. Genet., 2006, 40, 363-83). Classical- and backup-NHEJ pathways are known relying on different mechanism, wherein both pathways are error-prone. Repair by HDR requires homology, but those HDR pathways that use an intact chromosome to repair the broken one, i.e. double-strand break repair and synthesis-dependent strand annealing, are highly accurate. In the classical DSB repair pathway, the 3′ ends invade an intact homologous template then serve as a primer for DNA repair synthesis, ultimately leading to the formation of double Holliday junctions (dHJs). dHJs are four-stranded branched structures that form when elongation of the invasive strand “captures” and synthesizes DNA from the second DSB end. The individual HJs are resolved via cleavage in one of two ways. Synthesis-dependent strand annealing is conservative, and results exclusively in non-crossover events. This means that all newly synthesized sequences are present on the same molecule. Unlike the NHEJ repair pathway, following strand invasion and D loop formation in synthesis-dependent strand annealing, the newly synthesized portion of the invasive strand is displaced from the template and returned to the processed end of the non-invading strand at the other DSB end. The 3′ end of the non-invasive strand is elongated and ligated to fill the gap. There is a further pathway of HDR, called break-induced repair pathway not yet fully characterized. A central feature of this pathway is the presence of only one invasive end at a DSB that can be used for repair.

[0007] The naturally occurring NHEJ pathway, therefore, is highly efficient and a straightforward as it can assist in rejoining the two ends after a DSB independently of significant homology, whereas this efficiency is accompanied by the drawback that this process is error-prone and can be associated with insertions or deletions. The ubiquitously present NHEJ pathway in eukaryotic cells thus hampers targeted GE approaches.

[0008] A further challenge is the propensity for introduced RTs to integrate randomly into the genome at unpredictable and uncontrollable locations. One NHEJ pathway is mediated by Polymerase θ (Polymerase theta, Pol θ, or Pol theta), encoded by the POLQ gene (e.g., for plants see: van Kregten et al., 2016, T-DNA integration in plants results from polymerase-θ-mediated DNA repair. Nature Plants 2, Article number: 16164). Polymerase θ in mammals is an atypical A-family type polymerase with an N-terminal helicase-like domain, a large central domain harboring a Rad51 interaction motif, and a C-terminal polymerase domain capable of extending DNA strands from mismatched or even unmatched termini. DNA molecules can be randomly incorporated into eukaryotic genomes through the action of Pol θ being a low fidelity polymerase (Hogg et al., 2012. Promiscuous DNA synthesis by human DNA polymerase θ. Nucleic Acids Research, Volume 40, Issue 6, 1 Mar. 2012, Pages 2611-2622) that is required for random integration of T-DNAs in plants. Knockout mutant plants lacking Pol θ activity are incapable of integrating T-DNA molecules during Agrobacterium tumefaciens mediated plant transformation (van Kregten et al., 2016, supra). In vitro experiments identified an evolutionarily conserved loop in the polymerase domain that is essential for synapsing DNA ends during end joining protecting the genome against gross chromosomal rearrangements (Sfeir, The FASEB Journal, vol. 30, no. 1, 2016).

[0009] WO 2017/062754 A1 discloses GE methods in mammalian cells, focusing on mouse embryonic stem cells, wherein Pol theta is inhibited. Still, there remains the problem that the Pol theta mediated NHEJ pathway is only one of the cellular NHEJ pathways so that inhibition is not perfect and other error-prone repair pathways can hamper a targeted GE in said cell type. Furthermore, no approach is provided allowing the applicability of the disclosed methods in plant cells showing highly distinct repair mechanisms. In particular, the plant enzymes involved in error-prone repair pathways are poorly characterized making targeted GE in plant cells hard to predict. Targeted GE in plants, in particular the HDR, suffers from very low efficiency and in most crop species the delivery of the GE machinery to cells which subsequently regenerate into a transformed plant is not straightforward (e.g. protoplasts which are easy to transform do not regenerate in most crop species). Finally, there are only a few reliable methods available allowing for the isolation of the transformed cells from the majority of the untransformed cells in the tissue. These are only some difficulties the skilled artisan has to face when seeking a way to provide means for targeted GE in plant cells.

[0010] In practice, frequent random integrations of RTs limit the availability of the templates for use by cells in gene targeting, and make it difficult to screen cells or plants with the desired gene targeting events from a background of more abundant random integration events.

[0011] Thus, efficient gene targeting in eukaryotic cells is significantly hindered by low frequencies due to the prevalence of NHEJ-mediated DSB repair, and by the difficulty of screening for gene targeting events due to frequent random integration of the RT in many treated cells.

[0012] EP 2 958 996 A1 seeks to overcome the problem of specific DSB repair by providing an inhibitor of NHEJ mechanisms in cells to increase gene disruption mediated by a nuclease (e.g., ZFN or TALEN) or nuclease system (e.g., CRISPR/Cas, Cpf1, CasX or CasY). By inhibiting the critical enzymatic activities of these NHEJ DNA repair pathways, using small molecule inhibitors of DNA-dependent-protein kinase catalytic subunit (DNA-PKcs) and/or Poly-(ADP-ribose) polymerase ½ (PARP½), the level of gene disruption by nucleases is increased by forcing cells to resort to more error prone repair pathways than classic NHEJ, such as alternate NHEJ and/or microhomology mediated end-joining. Therefore, an additional chemical is added in the course of genome editing, which might, however, be disadvantageous for several cell types and assays. This could also affect the genome integrity of the treated cells and/or the regenerative potential.

[0013] Therefore, there exists an ongoing need in providing suitable strategies for precision GE in eukaryotic cells and organisms, which are also applicable in plants, especially major crop plants, which combine high precision genome cleavage and simultaneously providing the possibility for mediating highly precise and accurate HDR and thus targeted repair of a DSB, which is imperative to control a gene editing or genome engineering intervention.

[0014] It was thus an aim of the present invention to increase the predictability of GE approaches, in particular approaches applicable for plants and plant cells, wherein the outcome of a GE planned in silico can be defined in a much more accurate way by suppressing relevant NHEJ pathways in a concerted manner whilst additionally providing suitable repair templates to obtain a modified genetic material, preferably by using transient introduction strategies. Therefore, it was an objective of the present invention to unify down-regulation or knock-down of relevant NHEJ pathways with targeted GE strategies just within one cell or cellular system simultaneously to be able to introduce site-specific edits or modifications in a highly precise manner without inserting unwanted mutations or edits into a genome of interest as random—and thus not predictable—integrations during repair of a DSB artificially induced.

### SUMMARY OF THE INVENTION

[0015] The above objects have been solved by providing, in a first aspect, a method for modifying the genetic material of a cellular system at a predetermined location with at least one nucleic acid sequence of interest, wherein the method comprises the following steps: (a) providing a cellular system comprising a Polymerase theta enzyme, or a sequence encoding the same, and one or more further enzyme(s) of a NHEJ pathway, or the sequence(s) encoding the same; (b) inactivating or partially inactivating the Polymerase theta enzyme, or the sequence encoding the same, and inactivating or partially inactivating the one or more further DNA repair enzyme(s) of a NHEJ pathway, or the sequence(s) encoding the same; (c) introducing into the cellular system or a progeny system thereof (i) the at least one nucleic acid sequence of interest, optionally flanked by one or more homology sequence(s) complementary to one or more nucleic acid sequence(s) adjacent to the predetermined location, and (ii) at least one site-specific nuclease, or a sequence encoding the same, the site-specific nuclease inducing a double-strand break at the predetermined location; and (d) optionally: determining the presence of the modification at the predetermined location in the genetic material of the cellular system; (e) obtaining a cellular system comprising a modification at the predetermined location of the genetic material of the cellular system or selecting a cellular system comprising a modification at the predetermined location of the genetic material of the cellular system based on the determination of (d).

[0016] In one embodiment according to the various aspects of the present invention, there is provided a method comprising an additional step of: (f) restoring the activity of the inactivated or partially inactivated Polymerase theta enzyme and/or restoring the activity of the one or more further inactivated or partially inactivated DNA repair enzyme(s) of a NHEJ pathway in the cellular system comprising a modification at the predetermined location, or in a progeny system thereof.

[0017] In another embodiment according to the various aspects of the present invention, there is provided a method, wherein the Polymerase theta to be inactivated or partially inactivated (i) comprises an amino acid sequence according to SEQ ID NO: 2, 7, 8, 9 or 10, or (ii) comprises an amino acid sequence having at least 75%, 76%, 77%, 78%, 79%, 80%, 81%, 82%, 83%, 84%, 85%, 86%, 87%, 88%, 89%, 90%, 91%, 92%, 93%, 94%, 95%, 96%, 97%, 98%, or 99% sequence identity to the sequence set forth in SEQ ID NO: 2, 7, 8, 9 or 10, respectively, preferably over the entire length of the sequence; or (iii) is encoded by a nucleic acid sequence according to SEQ ID NO: 1, 3, 4, 5 or 6, or (iv) is encoded by a nucleic acid sequence having at least 75%, 76%, 77%, 78%, 79%, 80%, 81%, 82%, 83%, 84%, 85%, 86%, 87%, 88%, 89%, 90%, 91%, 92%, 93%, 94%, 95%, 96%, 97%, 98%, or 99% sequence identity to the sequence set forth in SEQ ID NO: 1, 3, 4, 5 or 6, respectively, preferably over the entire length of the sequence; or (v) is encoded by a nucleic acid sequence hybrizing to a nucleic acid sequence complementary to the nucleic acid sequence of (iii), preferably under stringent conditions.

[0018] In yet a further embodiment according to the various aspects of the present invention, there is provided a method, wherein the one or more further DNA repair enzyme(s) of a NHEJ pathway to be inactivated or partially inactivated is independently selected from the group consisting of Ku70, Ku80, DNA-dependent protein kinase, Ataxia telangiectasia mutated (ATM), ATM—and Rad3—related (ATR), Artemis, XRCC4, DNA ligase IV and XLF, or any combination thereof.

[0019] In one embodiment according to the various aspects of the present invention, at least one, at least two, at least three, or at least four further DNA repair enzymes of a NHEJ pathway are inactivated or partially inactivated, preferably wherein at least Ku70 and DNA ligase IV, or wherein at least Ku80 and DNA ligase IV are inactivated or partially inactivated.

[0020] In another embodiment according to the various aspects of the present invention, one, two, three, or four further DNA repair enzymes of a NHEJ pathway are inactivated or partially inactivated, preferably wherein Ku70 and DNA ligase IV, or wherein Ku80 and DNA ligase IV are inactivated or partially inactivated.

[0021] In one embodiment according to the various aspects of the present invention, there is provided a method, wherein the one or more further DNA repair enzyme(s) of a NHEJ pathway to be inactivated or partially inactivated is Ku70, or a nucleic acid sequence encoding the same, wherein the Ku70 comprises an amino acid sequence according to SEQ ID NO: 12, 18, 19 or 20, or an amino acid sequence having at least 75%, 76%, 77%, 78%, 79%, 80%, 81%, 82%, 83%, 84%, 85%, 86%, 87%, 88%, 89%, 90%, 91%, 92%, 93%, 94%, 95%, 96%, 97%, 98%, or 99% sequence identity to the sequence set forth in SEQ ID NO: 12, 18, 19 or 20, respectively, preferably over the entire length of the sequence, or wherein the nucleic acid sequence encoding the same comprises a sequence according to SEQ ID NO: 11, 13, 14, 15, 16 or 17, or a nucleic acid sequence having at least 75%, 76%, 77%, 78%, 79%, 80%, 81%, 82%, 83%, 84%, 85%, 86%, 87%, 88%, 89%, 90%, 91%, 92%, 93%, 94%, 95%, 96%, 97%, 98%, or 99% sequence identity to the sequence set forth in SEQ ID NO: 11, 13, 14, 15, 16 or 17, respectively, preferably over the entire length of the sequence, or the nucleic acid sequence hybridizes to a nucleic acid sequence complementary to the nucleic acid sequence according to SEQ ID NO: 11, 13, 14, 15, 16 or 17, preferably under stringent conditions.

[0022] In a further embodiment according to the various aspects of the present invention, there is provided a method, wherein the one or more further DNA repair enzyme(s) of a NHEJ pathway to be inactivated or partially inactivated is Ku80, or a nucleic acid sequence encoding the same, wherein the Ku80 comprises an amino acid sequence according to SEQ ID NO: 22, 23, 24 or 29, or an amino acid sequence having at least 75%, 76%, 77%, 78%, 79%, 80%, 81%, 82%, 83%, 84%, 85%, 86%, 87%, 88%, 89%, 90%, 91%, 92%, 93%, 94%, 95%, 96%, 97%, 98%, or 99% sequence identity to the sequence set forth in SEQ ID NO: 22, 23, 24 or 29, respectively, preferably over the entire length of the sequence, or wherein the nucleic acid sequence encoding the same comprises a sequence according to SEQ ID NO: 21, 25, 26, 27 or 28, or a nucleic acid sequence having at least 75%, 76%, 77%, 78%, 79%, 80%, 81%, 82%, 83%, 84%, 85%, 86%, 87%, 88%, 89%, 90%, 91%, 92%, 93%, 94%, 95%, 96%, 97%, 98%, or 99% sequence identity to the sequence set forth in SEQ ID NO: 21, 25, 26, 27 or 28, respectively, preferably over the entire length of the sequence, or the nucleic acid sequence hybridizes to a nucleic acid sequence complementary to the nucleic acid sequence according to SEQ ID NO: 21, 25, 26, 27 or 28, preferably under stringent conditions.

[0023] In an additional embodiment according to the various aspects of the present invention, there is provided a method, wherein the one or more further DNA repair enzyme(s) of a NHEJ pathway to be inactivated or partially inactivated is a DNA-dependent protein kinase, or a nucleic acid sequence encoding the same, wherein the DNA-dependent protein kinase comprises an amino acid sequence according to SEQ ID NO: 32, 33 or 35, or an amino acid sequence having at least 75%, 76%, 77%, 78%, 79%, 80%, 81%, 82%, 83%, 84%, 85%, 86%, 87%, 88%, 89%, 90%, 91%, 92%, 93%, 94%, 95%, 96%, 97%, 98%, or 99% sequence identity to the sequence set forth in SEQ ID NO: 32, 33 or 35, respectively, preferably over the entire length of the sequence, or wherein the nucleic acid sequence encoding the same comprises a sequence according to SEQ ID NO: 30, 31 or 34, or a nucleic acid sequence having at least 75%, 76%, 77%, 78%, 79%, 80%, 81%, 82%, 83%, 84%, 85%, 86%, 87%, 88%, 89%, 90%, 91%, 92%, 93%, 94%, 95%, 96%, 97%, 98%, or 99% sequence identity to the sequence set forth in SEQ ID NO: 30, 31 or 34, respectively, preferably over the entire length of the sequence, or the nucleic acid sequence hybridizes to a nucleic acid sequence complementary to the nucleic acid sequence according to SEQ ID NO: 30, 31 or 34, preferably under stringent conditions.

[0024] In a further embodiment according to the various aspects of the present invention, there is provided a method, wherein the one or more further DNA repair enzyme(s) of a NHEJ pathway to be inactivated or partially inactivated is ATM, or a nucleic acid sequence encoding the same, wherein the ATM comprises an amino acid sequence according to SEQ ID NO: 37, 38, 39, 41, 42, 43, 44, 45, 46, 47 or 48, or an amino acid sequence having at least 75%, 76%, 77%, 78%, 79%, 80%, 81%, 82%, 83%, 84%, 85%, 86%, 87%, 88%, 89%, 90%, 91%, 92%, 93%, 94%, 95%, 96%, 97%, 98%, or 99% sequence identity to the sequence set forth in SEQ ID NO: 37, 38, 39, 41, 42, 43, 44, 45, 46, 47 or 48, respectively, preferably over the entire length of the sequence, or wherein the nucleic acid sequence encoding the same comprises a sequence according to SEQ ID NO: 36 or 40, or a nucleic acid sequence having at least 75%, 76%, 77%, 78%, 79%, 80%, 81%, 82%, 83%, 84%, 85%, 86%, 87%, 88%, 89%, 90%, 91%, 92%, 93%, 94%, 95%, 96%, 97%, 98%, or 99% sequence identity to the sequence set forth in SEQ ID NO: 36 or 40, respectively, preferably over the entire length of the sequence, or the nucleic acid sequence hybridizes to a nucleic acid sequence complementary to the nucleic acid sequence according to SEQ ID NO: 36 or 40, preferably under stringent conditions.

[0025] In an additional embodiment according to the various aspects of the present invention, there is provided a method, wherein the one or more further DNA repair enzyme(s) of a NHEJ pathway to be inactivated or partially inactivated is ATM—and Rad3—related (ATR), or a nucleic acid sequence encoding the same, wherein the ATR comprises an amino acid sequence according to SEQ ID NO: 50, 51, 52, 53, 55 or 56, or an amino acid sequence having at least 75%, 76%, 77%, 78%, 79%, 80%, 81%, 82%, 83%, 84%, 85%, 86%, 87%, 88%, 89%, 90%, 91%, 92%, 93%, 94%, 95%, 96%, 97%, 98%, or 99% sequence identity to the sequence set forth in SEQ ID NO: 50, 51, 52, 53, 55 or 56, respectively, preferably over the entire length of the sequence, or wherein the nucleic acid sequence encoding the same comprises a sequence according to SEQ ID NO: 49 or 54, or a nucleic acid sequence having at least 75%, 76%, 77%, 78%, 79%, 80%, 81%, 82%, 83%, 84%, 85%, 86%, 87%, 88%, 89%, 90%, 91%, 92%, 93%, 94%, 95%, 96%, 97%, 98%, or 99% sequence identity to the sequence set forth in SEQ ID NO: 49 or 54, respectively, preferably over the entire length of the sequence, or the nucleic acid sequence hybridizes to a nucleic acid sequence complementary to the nucleic acid sequence according to SEQ ID NO: 49 or 54, preferably under stringent conditions.

[0026] In a further embodiment according to the various aspects of the present invention, there is provided a method, wherein the one or more further DNA repair enzyme(s) of a NHEJ pathway to be inactivated or partially inactivated is Artemis, or a nucleic acid sequence encoding the same, wherein the Artemis comprises an amino acid sequence according to SEQ ID NO: 60, 61, 62 or 64, or an amino acid sequence having at least 75%, 76%, 77%, 78%, 79%, 80%, 81%, 82%, 83%, 84%, 85%, 86%, 87%, 88%, 89%, 90%, 91%, 92%, 93%, 94%, 95%, 96%, 97%, 98%, or 99% sequence identity to the sequence set forth in SEQ ID NO: 60, 61, 62 or 64, respectively, preferably over the entire length of the sequence, or wherein the nucleic acid sequence encoding the same comprises a sequence according to SEQ ID NO: 57, 58, 59 or 63, or a nucleic acid sequence having at least 75%, 76%, 77%, 78%, 79%, 80%, 81%, 82%, 83%, 84%, 85%, 86%, 87%, 88%, 89%, 90%, 91%, 92%, 93%, 94%, 95%, 96%, 97%, 98%, or 99% sequence identity to the sequence set forth in SEQ ID NO: 57, 58, 59 or 63, respectively, preferably over the entire length of the sequence, or the nucleic acid sequence hybridizes to a nucleic acid sequence complementary to the nucleic acid sequence according to SEQ ID NO: 57, 58, 59 or 63, preferably under stringent conditions.

[0027] In an additional embodiment according to the various aspects of the present invention, there is provided a method, wherein the one or more further DNA repair enzyme(s) of a NHEJ pathway to be inactivated or partially inactivated is XRCC4, or a nucleic acid sequence encoding the same, wherein the XRCC4 comprises an amino acid sequence according to SEQ ID NO: 66, 67 or 69, or an amino acid sequence having at least 75%, 76%, 77%, 78%, 79%, 80%, 81%, 82%, 83%, 84%, 85%, 86%, 87%, 88%, 89%, 90%, 91%, 92%, 93%, 94%, 95%, 96%, 97%, 98%, or 99% sequence identity to the sequence set forth in SEQ ID NO: 66, 67 or 69, respectively, preferably over the entire length of the sequence, or wherein the nucleic acid sequence encoding the same comprises a sequence according to SEQ ID NO: 65 or 68, or a nucleic acid sequence having at least 75%, 76%, 77%, 78%, 79%, 80%, 81%, 82%, 83%, 84%, 85%, 86%, 87%, 88%, 89%, 90%, 91%, 92%, 93%, 94%, 95%, 96%, 97%, 98%, or 99% sequence identity to the sequence set forth in SEQ ID NO: 65 or 68, respectively, preferably over the entire length of the sequence, or the nucleic acid sequence hybridizes to a nucleic acid sequence complementary to the nucleic acid sequence according to SEQ ID NO: 65 or 68, preferably under stringent conditions.

[0028] In a further embodiment according to the various aspects of the present invention, there is provided a method, wherein the one or more further DNA repair enzyme(s) of a NHEJ pathway to be inactivated or partially inactivated is DNA ligase IV, or a nucleic acid sequence encoding the same, wherein the DNA ligase IV comprises an amino acid sequence according to SEQ ID NO: 71, 72, 76 or 77, or an amino acid sequence having at least 75%, 76%, 77%, 78%, 79%, 80%, 81%, 82%, 83%, 84%, 85%, 86%, 87%, 88%, 89%, 90%, 91%, 92%, 93%, 94%, 95%, 96%, 97%, 98%, or 99% sequence identity to the sequence set forth in SEQ ID NO: 71, 72, 76 or 77, respectively, preferably over the entire length of the sequence, or wherein the nucleic acid sequence encoding the same comprises a sequence according to SEQ ID NO: 70, 73, 74 or 75, or a nucleic acid sequence having at least 75%, 76%, 77%, 78%, 79%, 80%, 81%, 82%, 83%, 84%, 85%, 86%, 87%, 88%, 89%, 90%, 91%, 92%, 93%, 94%, 95%, 96%, 97%, 98%, or 99% sequence identity to the sequence set forth in SEQ ID NO: 70, 73, 74 or 75, respectively, preferably over the entire length of the sequence, or the nucleic acid sequence hybridizes to a nucleic acid sequence complementary to the nucleic acid sequence according to SEQ ID NO: 70, 73, 74 or 75, preferably under stringent conditions.

[0029] In an additional embodiment according to the various aspects of the present invention, there is provided a method, wherein the one or more further DNA repair enzyme(s) of a NHEJ pathway to be inactivated or partially inactivated is XLF, or a nucleic acid sequence encoding the same.

[0030] In another embodiment according to the various aspects of the present invention, there is provided a method, wherein the one or more further DNA repair enzyme(s) of a NHEJ pathway to be inactivated or partially inactivated are the Ku70 or the nucleic acid sequence encoding the same, and/or the Ku80 or the nucleic acid sequence encoding the same, and/or the DNA-dependent protein kinase, or the nucleic acid sequence encoding the same, and/or the ATM or the nucleic acid sequence encoding the same, and/or the ATM—and Rad3—related (ATR), or the nucleic acid sequence encoding the same, and/or the Artemis, or the nucleic acid sequence encoding the same, and/or the XRCC4, or the nucleic acid sequence encoding the same, and/or the DNA ligase IV, or the nucleic acid sequence encoding the same, and/or the XLF, or the nucleic acid sequence encoding the same.

[0031] In one embodiment according to the various aspects of the present invention, there is provided a method, wherein the at least one nucleic acid sequence of interest is provided as part of at least one genetic construct, or as at least one linear molecule.

[0032] In another embodiment according to the various aspects of the present invention, there is provided a method, wherein the at least one genetic construct is introduced into the cellular system by biological or physical means, including transfection, transformation, including transformation by Agrobacterium spp., preferably by Agrobacterium tumefaciens, a viral vector, biolistic bombardment, transfection using chemical agents, including polyethylene glycol transfection, electroporation, electro cell fusion, or any combination thereof.

[0033] In still another embodiment according to the various aspects of the present invention, there is provided a method, wherein the at least one site-specific nuclease or a part thereof, or the sequence encoding the same, is introduced into the cellular system by biological or physical means, including transfection, transformation, including transformation by Agrobacterium spp., preferably by Agrobacterium tumefaciens, a viral vector, bombardment, transfection using chemical agents, including polyethylene glycol transfection, electroporation, electro cell fusion, or any combination thereof.

[0034] Further provided is a method according to the various aspects disclosed herein, wherein the at least one site-specific nuclease or a catalytically active fragment thereof, is introduced into the cellular system as a nucleic acid sequence encoding the site-specific nuclease or the catalytically active fragment thereof, wherein the nucleic acid sequence is part of at least one genetic construct, or wherein the at least one site-specific nuclease or the catalytically active fragment thereof, is introduced into the cellular system as at least one mRNA molecule or as at least one amino acid sequence.

[0035] In one embodiment according to the various aspects of the present invention, there is provided a method, wherein the at least one nucleic acid sequence of interest to be introduced into a cellular system is selected from the group consisting of: a transgene, a cisgene, a modified endogenous gene, a codon optimized gene, a synthetic sequence, an intronic sequence, a coding sequence, or a regulatory sequence or a part thereof including a core promoter, a cis-acting element, conserved motif like TATA box et cetera.

[0036] In another embodiment according to the various aspects of the present invention, there is provided a method, wherein the at least one nucleic acid sequence of interest to be introduced into a cellular system is a transgene or cisgene, wherein the transgene or cisgene comprises a nucleic acid sequence encoding a gene of a genome of an organism of interest, or at least a part of said gene.

[0037] In still another embodiment according to the various aspects of the present invention, there is provided a method, wherein the at least one nucleic acid sequence of interest to be introduced into a cellular system at a predetermined location is a transgene or a cisgene or part of the transgene or cisgene of an organism of interest, wherein the transgene or the cisgene or part of the transgene or cisgene is selected from the group consisting of a gene encoding tolerance to abiotic stress, including drought stress, osmotic stress, heat stress, chilling stress, cold stress including frost, oxidative stress, heavy metal stress, nitrogen deficiency, phosphate deficiency, salt stress or waterlogging, herbicide resistance, including resistance to glyphosate, glufosinate/phosphinotricin, hygromycin (hyg), protoporphyrinogen oxidase (PPO) inhibitors, ALS inhibitors, and Dicamba, a gene encoding resistance or tolerance to biotic stress, including a viral resistance gene, a fungal resistance gene, a bacterial resistance gene, an insect resistance gene, or a gene encoding a yield related trait, including lodging resistance, bolting resistance, flowering time, shattering resistance, seed color, endosperm composition, or nutritional content.

[0038] In one embodiment according to the various aspects of the present invention, there is provided a method, wherein the at least one nucleic acid sequence of interest to be introduced into a cellular system at a predetermined location is at least part of a modified endogenous gene of an organism of interest, wherein the modified endogenous gene comprises at least one deletion, insertion and/or substitution of at least one nucleotide in comparison to the nucleic acid sequence of the unmodified (wildtype) endogenous gene.

[0039] In another embodiment according to the various aspects of the present invention, there is provided a method, wherein the at least one nucleic acid sequence of interest to be introduced into a cellular system at a predetermined location is at least part of a modified endogenous gene of an organism of interest, wherein the modified endogenous gene comprises at least one of a truncation, duplication, substitution and/or deletion of at least one nucleic acid position encoding a domain of the modified endogenous gene.

[0040] In yet another embodiment according to the various aspects of the present invention, there is provided a method, wherein the at least one nucleic acid sequence of interest to be introduced into a cellular system at a predetermined location is at least part of a regulatory sequence, wherein the regulatory sequence comprises at least one of a core promoter sequence, a proximal promoter sequence, a cis acting element, a trans acting element, a locus control sequences, an insulator sequence, a silencer sequence, an enhancer sequence, a terminator sequence, a conserved motif of a regulatory element like TATA box and/or any combination thereof.

[0041] In one embodiment according to the various aspects of the present invention, there is provided a method, wherein the at least one site-specific nuclease comprises a zinc-finger nuclease, a transcription activator-like effector nuclease, a CRISPR/Cas system, including a CRISPR/Cas9 system, a CRISPR/Cpf1 system, a CRISPR/CasX system, a CRISPR/CasY system, an engineered homing endonuclease, and a meganuclease, and/or any combination, variant, or catalytically active fragment thereof.

[0042] In a further embodiment according to the various aspects of the present invention, there is provided a method, wherein the one or more nucleic acid sequence(s) flanking the at least one nucleic acid sequence of interest at the predetermined location is/are at least 85%, 86%, 87%, 88%, or 89%, preferably at least 90%, 91%, 92%, 93%, 94% or 95%, more preferably at least 96%, 97%, 98%, 99%, 99.5% or 100% complementary to the one or more nucleic acid sequence(s) adjacent to the predetermined location, upstream and/or downstream from the predetermined location, over the entire length of the respective adjacent region(s).

[0043] In yet a further embodiment according to the various aspects of the present invention, there is provided a method, wherein the genetic material of the cellular system is selected from the group consisting of a protoplast, a viral genome transferred in a recombinant host cell, a eukaryotic or prokaryotic cell, tissue, or organ, and a eukaryotic or prokaryotic organism.

[0044] In one embodiment according to the various aspects of the present invention, there is provided a method, wherein the genetic material of the cellular system is selected from a eukaryotic cell, wherein the eukaryotic cell is a plant cell.

[0045] In a further embodiment according to the various aspects of the present invention, there is provided a method, wherein the eukaryotic organism is a plant, or a part of a plant.

[0046] In yet a further embodiment according to the various aspects of the present invention, there is provided a method, wherein the part of the plant is selected from the group consisting of leaves, stems, roots, emerged radicles, flowers, flower parts, petals, fruits, pollen, pollen tubes, anther filaments, ovules, embryo sacs, egg cells, ovaries, zygotes, embryos, zygotic embryos, somatic embryos, apical meristems, vascular bundles, pericycles, seeds, roots, and cuttings.

[0047] In one embodiment according to the various aspects of the present invention, there is provided a method, wherein the genetic material of the cellular system is, or originates from, a plant species selected from the group consisting of: Hordeum vulgare, Hordeum bulbusom, Sorghum bicolor, Saccharum officinarium, Zea mays, Setaria italica, Oryza minuta, Oriza sativa, Oryza australiensis, Oryza alta, Triticum aestivum, Secale cereale, Malus domestica, Brachypodium distachyon, Hordeum marinum, Aegilops tauschii, Daucus glochidiatus, Beta vulgaris, Daucus pusillus, Daucus muricatus, Daucus carota, Eucalyptus grandis, Nicotiana sylvestris, Nicotiana tomentosiformis, Nicotiana tabacum, Solanum lycopersicum, Solanum tuberosum, Coffea canephora, Vitis vinifera, Erythrante guttata, Genlisea aurea, Cucumis sativus, Morus notabilis, Arabidopsis arenosa, Arabidopsis lyrata, Arabidopsis thaliana, Crucihimalaya himalaica, Crucihimalaya wallichii, Cardamine flexuosa, Lepidium virginicum, Capsella bursa pastoris, Olmarabidopsis pumila, Arabis hirsute, Brassica napus, Brassica oeleracia, Brassica rapa, Raphanus sativus, Brassica juncea, Brassica nigra, Eruca vesicaria subsp. sativa, Citrus sinensis, Jatropha curcas, Populus trichocarpa, Medicago truncatula, Cicer yamashitae, Cicer bijugum, Cicer arietinum, Cicer reticulatum, Cicer judaicum, Cajanus cajanifolius, Cajanus scarabaeoides, Phaseolus vulgaris, Glycine max, Astragalus sinicus, Lotus japonicas, Torenia fournieri, Allium cepa, Allium fistulosum, Allium sativum, and Allium tuberosum.

[0048] In a further aspect according to the present invention, there is provided a cellular system obtained by a method according to any one of the above aspects and embodiments.

[0049] In yet a further aspect according to the present invention, there is provided a cellular system comprising an inactivated or partially inactivated Polymerase theta (Pol theta) enzyme and one or more further inactivated or partially inactivated DNA repair enzyme(s) of a NHEJ pathway, wherein the modified cellular system is selected from the group consisting of one or more plant cell(s), a plant, and parts of a plant.

[0050] In one embodiment according to the various aspects disclosed herein, there is provided a cellular system, wherein the one or more part(s) of the plant is/are selected from the group consisting of leaves, stems, roots, emerged radicles, flowers, flower parts, petals, fruits, pollen, pollen tubes, anther filaments, ovules, embryo sacs, egg cells, ovaries, zygotes, embryos, zygotic embryos, somatic embryos, apical meristems, vascular bundles, pericycles, seeds, roots, and cuttings.

[0051] In another embodiment according to the various aspects disclosed herein, there is provided a cellular system, wherein the one or more plant cell(s), the plant(s) or the part(s) of a plant originate(s) from a plant species selected from the group consisting of: Hordeum vulgare, Hordeum bulbusom, Sorghum bicolor, Saccharum officinarium, Zea mays, Setaria italica, Oryza minuta, Oriza sativa, Oryza australiensis, Oryza alta, Triticum aestivum, Secale cereale, Malus domestica, Brachypodium distachyon, Hordeum marinum, Aegilops tauschii, Daucus glochidiatus, Beta vulgaris, Daucus pusillus, Daucus muricatus, Daucus carota, Eucalyptus grandis, Nicotiana sylvestris, Nicotiana tomentosiformis, Nicotiana tabacum, Solanum lycopersicum, Solanum tuberosum, Coffea canephora, Vitis vinifera, Erythrante guttata, Genlisea aurea, Cucumis sativus, Morus notabilis, Arabidopsis arenosa, Arabidopsis lyrata, Arabidopsis thaliana, Crucihimalaya himalaica, Crucihimalaya wallichii, Cardamine flexuosa, Lepidium virginicum, Capsella bursa pastoris, Olmarabidopsis pumila, Arabis hirsute, Brassica napus, Brassica oeleracia, Brassica rapa, Raphanus sativus, Brassica juncea, Brassica nigra, Eruca vesicaria subsp. sativa, Citrus sinensis, Jatropha curcas, Populus trichocarpa, Medicago truncatula, Cicer yamashitae, Cicer bijugum, Cicer arietinum, Cicer reticulatum, Cicer judaicum, Cajanus cajanifolius, Cajanus scarabaeoides, Phaseolus vulgaris, Glycine max, Astragalus sinicus, Lotus japonicas, Torenia fournieri, Allium cepa, Allium fistulosum, Allium sativum, and Allium tuberosum.

[0052] Further aspects and embodiments of the present invention can be derived from the subsequent detailed description, the sequence listing as well as the attached set of claims.

### DRAWINGS

[0053] FIG. 1. Overview of PolQ, Ku70, Ku80 and LigIV gene expression in the mutants lines N698253 (teb-2), N667884 (teb-5), N656431 (ligIV), N656936 (ku70) and N677892 (ku80). Gene expression was determined by qRT-PCR using primers directed to a region not overlapping with the T-DNA insertion site. Col-0 wild type plants were used as reference. qRT-PCR data indicate that expression of PolQ, LigIV and Ku80 genes is significantly reduced in the respective mutant lines. Although Ku70 transcripts are detectable in N656936, the mutant line can be a null mutant.

[0054] FIG. 2. Depiction of the used gene targeting construct. LB/RB: Left border/right border; PcUbi4-2(P): Parsley ubiquitin promoter; Cas9: Cas9 nuclease; AtU6-26(P): U6 promter to express the guide RNA (sgRNA). The vertical lines indicate the recognition sites for the Cas9 nuclease, and mark the gene targeting cassette. The cassette is flanked by homologous sequences for the ADH1 gene target (674 bp upstream, 673 bp downstream) and a GFP coding sequence under control of the seed specific 2S promoter (A). Seed obtained after floral dip transformation of the targeting construct into Col-0 Arabidopsis plants. Right: bright field; Left: Green fluorescence. The white circles indicate fluorescent seeds (B).

[0055] FIG. 3. Bright field picture of transformed wildtype (Col-0) and mutant line teb-2. BASTA selection was done for aliquots of the transformed wildtype and mutant lines (shown is only the teb-2 mutant line. Results for the other mutant lines were similar). For none of the mutants BASTA resistant plants were identified, demonstrating that there is no random integration of the T-DNA into these mutants.

[0056] FIG. 4. Confirmation of gene targeting in fluorescent seeds by PCR. (A) #2: Fluorescent seed from transformed pol Q mutant line (putative gene targeting event); #3: Fluorescent seed from transformed Col-0 wild type plant (random integration). (B) PCR confirmation of gene targeting: #2, #3: DNA from plants grown from the respective fluorescent seeds. WT: DNA from untransformed Col-0 wildtype plant. P: Gene targeting vector (Plasmid DNA). PCR1: Wildtype adh1 locus. PCR2: Detection of the homologous recombination event using the primers HDRadh1-F (binding only in the adh1 genomic locus) and HDRadh1-R (binding in the 2S promoter of the gene targeting cassette). (C) Binding sites are indicated in the lower drawing, the product size is 945 bp. Formation of the product confirms a homologous recombination and is found only in fluorescent mutant seed (#2), while it is absent in the fluorescent wildtype seed. The Col-0 wildtype and the plasmid serve as controls. PCR3: Same as PCR2, except that primers HDRadh1-F2/R2 were used. These primers are binding a few bases upstream/downstream of the amplicon of PCR2, leading to a slight bigger product. PCR3 confirms the results of PCR2 with a second independent primer set.

### DEFINITIONS

[0057] The terms “associated with” or “in association with” according to the present disclosure are to be construed broadly and, therefore, according to the present invention imply that a molecule (DNA, RNA, amino acid, comprising naturally occurring and/or synthetic building blocks) is provided in physical association with another molecule, the association being either of covalent or non-covalent nature. For example, a repair template can be associated with a gRNA of a CRISPR nuclease, wherein the association can be of non covalent nature (complementary base pairing), or the molecules can be physically attached to each other by a covalent bond.

[0058] The term “catalytically active fragment” as used herein referring to amino acid sequences denotes the core sequence derived from a given template amino acid sequence, or a nucleic acid sequence encoding the same, comprising all or part of the active site of the template sequence with the proviso that the resulting catalytically active fragment still possesses the activity characterizing the template sequence, for which the active site of the native enzyme or a variant thereof is responsible. Said modifications are suitable to generate less bulky amino acid sequences still having the same activity as a template sequence making the catalytically active fragment a more versatile or more stable tool being sterically less demanding.

[0059] A “covalent attachment” or “covalent bond” is a chemical bond that involves the sharing of electron pairs between atoms of the molecules or sequences covalently attached to each other. A “non-covalent” interaction differs from a covalent bond in that it does not involve the sharing of electrons, but rather involves more dispersed variations of electromagnetic interactions between molecules/sequences or within a molecule/sequence. Non-covalent interactions or attachments thus comprise electrostatic interactions, van der Waals forces, π-effects and hydrophobic effects. Of special importance in the context of nucleic acid molecules are hydrogen bonds as electrostatic interaction. A hydrogen bond (H-bond) is a specific type of dipole-dipole interaction that involves the interaction between a partially positive hydrogen atom and a highly electronegative, partially negative oxygen, nitrogen, sulfur, or fluorine atom not covalently bound to said hydrogen atom. Any “association” or “physical association” as used herein thus implies a covalent or non-covalent interaction or attachment. In the case of molecular complexes, e.g. a complex formed by a CRISPR nuclease, a gRNA and a RT, more covalent and non-covalent interactions can be present for linking and thus associating the different components of a molecular complex of interest.

[0060] The terms “CRISPR polypeptide”, “CRISPR endonuclease”, “CRISPR nuclease”, “CRISPR protein”, “CRISPR effector” or “CRISPR enzyme” are used interchangeably herein and refer to any naturally occurring or artificial amino acid sequence, or the nucleic acid sequence encoding the same, acting as site-specific DNA nuclease or nickase, wherein the “CRISPR polypeptide” is derived from a CRISPR system of any organism, which can be cloned and used for targeted genome engineering. The terms “CRISPR nuclease” or “CRISPR polypeptide” also comprise mutants or catalytically active fragments or fusions of a naturally occurring CRISPR effector sequences, or the respective sequences encoding the same. A “CRISPR nuclease” or “CRISPR polypeptide” may thus, for example, also refer to a CRISPR nickase or even a nuclease-deficient variant of a CRISPR polypeptide having endonucleolytic function in its natural environment.

[0061] A “eukaryotic cell” as used herein refers to a cell having a true nucleus, a nuclear membrane and organelles belonging to any one of the kingdoms of Protista, Plantae, Fungi, or Animalia. Eukaryotic organisms can comprise monocellular and multicellular organisms. Preferred eukaryotic cells and organisms according to the present invention are plant cells (see below).

[0062] “Complementary” or “complementarity” as used herein describes the relationship between two (c)DNA, two RNA, or between an RNA and a (c)DNA nucleic acid region. Defined by the nucleobases of the DNA or RNA, two nucleic acid regions can hybridize to each other in accordance with the lock-and-key model. To this end the principles of Watson-Crick base pairing have the basis adenine and thymine/uracil as well as guanine and cytosine, respectively, as complementary bases apply. Furthermore, also non-Watson-Crick pairing, like reverse-Watson-Crick, Hoogsteen, reverse-Hoogsteen and Wobble pairing are comprised by the term “complementary” as used herein as long as the respective base pairs can build hydrogen bonding to each other, i.e. two different nucleic acid strands can hybridize to each other based on said complementarity.

[0063] The term “derivative” or “descendant” or “progeny” as used herein in the context of a prokaryotic or a eukaryotic cell, preferably an animal cell and more preferably a plant or plant cell or plant material according to the present disclosure relates to the descendants of such a cell or material which result from natural reproductive propagation including sexual and asexual propagation. It is well known to the person having skill in the art that said propagation can lead to the introduction of mutations into the genome of an organism resulting from natural phenomena which results in a descendant or progeny, which is genomically different to the parental organism or cell, however, still belongs to the same genus/species and possesses mostly the same characteristics as the parental recombinant host cell. Such derivatives or descendants or progeny resulting from natural phenomena during reproduction or regeneration are thus comprised by the term of the present disclosure and can be readily identified by the skilled person when comparing the “derivative” or “descendant” or “progeny” to the respective parent or ancestor. Furthermore, the term “derivative”, in the context of a substance or molecule and not referring to a replicating cell or organism, can imply a substance or molecule derived from the original substance or molecule by chemical and/or biotechnological means.

[0064] As used herein, “fusion” or “fused” can refer to a protein and/or nucleic acid comprising one or more non-native sequences (e.g., moieties). Any nucleic acid sequence or amino acid sequence according to the present invention can thus be provided in the form of a fusion molecule. A fusion can be at the N-terminal or C-terminal end of the modified protein, or both, or within the molecule as separate domain. For nucleic acid molecules, the fusion molecule can be attached at the 5′ or 3′ end, or at any suitable position in between. A fusion can be a transcriptional and/or translational fusion. A fusion can comprise one or more of the same non-native sequences. A fusion can comprise one 10 or more of different non-native sequences. A fusion can be a chimera. A fusion can comprise a nucleic acid affinity tag. A fusion can comprise a barcode. A fusion can comprise a peptide affinity tag. A fusion can provide for subcellular localization of the site-specific effector or base editor (e.g., a nuclear localization signal (NLS) for targeting (e.g., a site-specific nuclease) to the nucleus, a mitochondrial localization signal for targeting to the mitochondria, a chloroplast localization signal for targeting to a chloroplast, an endoplasmic reticulum (ER) retention signal, and the like). A fusion can provide a non-native sequence (e.g., affinity tag) that can be used to track or purify. A fusion can be a small molecule such as biotin or a dye such as alexa fluor dyes, Cyanine3 dye, Cyanine5 dye. The fusion can provide for increased or decreased stability. In some embodiments, a fusion can comprise a detectable label, including a moiety that can provide a detectable signal. Suitable detectable labels and/or moieties that can provide a detectable signal can include, but are not limited to, an enzyme, a radioisotope, a member of a specific binding pair; a fluorophore; a fluorescent reporter or fluorescent protein; a quantum dot; and the like. A fusion can comprise a member of a FRET pair, or a fluorophore/quantum dot donor/acceptor pair. A fusion can comprise an enzyme. Suitable enzymes can include, but are not limited to, horse radish peroxidase, luciferase, beta-25 galactosidase, and the like. A fusion can comprise a fluorescent protein. Suitable fluorescent proteins can include, but are not limited to, a green fluorescent protein (GFP), (e.g., a GFP from Aequoria victoria, fluorescent proteins from Anguilla japonica, or a mutant or derivative thereof), a red fluorescent protein, a yellow fluorescent protein, a yellow-green fluorescent protein (e.g., mNeonGreen derived from a tetrameric fluorescent protein from the cephalochordate Branchiostoma lanceolatum) any of a variety of fluorescent and colored proteins. A fusion can comprise a nanoparticle. Suitable nanoparticles can include fluorescent or luminescent nanoparticles, and magnetic nanoparticles, or nanodiamonds, optionally linked to a nanoparticle. Any optical or magnetic property or characteristic of the nanoparticle(s) can be detected. A fusion can comprise a helicase, a nuclease (e.g., FokI), an endonuclease, an exonuclease (e.g., a 5′ exonuclease and/or 3′ exonuclease), a ligase, a nickase, a nuclease-helicase (e.g., Cas3), a DNA methyltransferase (e.g., Dam), or DNA demethylase, a histone methyltransferase, a histone demethylase, an acetylase (including for example and not limitation, a histone acetylase), a deacetylase (including for example and not limitation, a histone deacetylase), a phosphatase, a kinase, a transcription (co-) activator, a transcription (co-) factor, an RNA polymerase subunit, a transcription repressor, a DNA binding protein, a DNA structuring protein, a long non-coding RNA, a DNA repair protein (e.g., a protein involved in repair of either single- and/or double-stranded breaks, e.g., proteins involved in base excision repair, nucleotide excision repair, mismatch repair, NHEJ, HR, microhomology-mediated end joining (MMEJ), and/or alternative non-homologous end-joining (ANHEJ), such as for example and not limitation, HR regulators and HR complex assembly signals), a marker protein, a reporter protein, a fluorescent protein, a ligand binding protein (e.g., mCherry or a heavy metal binding protein), a signal peptide (e.g., Tat-signal sequence), a targeting protein or peptide, a subcellular localization sequence (e.g., nuclear localization sequence, a chloroplast localization sequence), and/or an antibody epitope, or any combination thereof.

[0065] The terms “genetic construct” or “recombinant construct”, “vector”, or “plasmid (vector)” (e.g., in the context of at least one nucleic acid sequence to be introduced into a cellular system) are used herein to refer to a construct comprising, inter alia, plasmids or (plasmid) vectors, cosmids, artificial yeast- or bacterial artificial chromosomes (YACs and BACs), phagemides, bacterial phage based vectors, an expression cassette, isolated single-stranded or double-stranded nucleic acid sequences, comprising DNA and RNA sequences in linear or circular form, or amino acid sequences, viral vectors, including modified viruses, and a combination or a mixture thereof, for introduction or transformation, transfection or transduction into any prokaryotic or eukaryotic target cell, including a plant, plant cell, tissue, organ or material according to the present disclosure. “Recombinant” in the context of a biological material, e.g., a cell or vector, thus implies an artificially produced material. A recombinant construct according to the present disclosure can comprise an effector domain, either in the form of a nucleic acid or an amino acid sequence, wherein an effector domain represents a molecule, which can exert an effect in a target cell and includes a transgene, a cisgene, a single-stranded or double-stranded RNA molecule, including a guide RNA ((s)gRNA), a miRNA or an siRNA, or an amino acid sequences, including, inter alia, an enzyme or a catalytically active fragment thereof, a binding protein, an antibody, a transcription factor, a nuclease, preferably a site specific nuclease, and the like. Furthermore, the recombinant construct can comprise regulatory sequences and/or localization sequences. The recombinant construct can be integrated into a vector, including a plasmid vector, and/or it can be present isolated from a vector structure, for example, in the form of a polypeptide sequence or as a non-vector connected single-stranded or double-stranded nucleic acid. After its introduction, e.g. by transformation or transfection by biological or physical means, the genetic construct can either persist extrachromosomally, i.e. non integrated into the genome of the target cell, for example in the form of a double-stranded or single-stranded DNA, a double-stranded or single-stranded RNA or as an amino acid sequence. Alternatively, the genetic construct, or parts thereof, according to the present disclosure can be stably integrated into the genome of a target cell, including the nuclear genome or further genetic elements of a target cell, including the genome of plastids like mitochondria or chloroplasts. The term plasmid vector as used in this connection refers to a genetic construct originally obtained from a plasmid. A plasmid usually refers to a circular autonomously replicating extrachromosomal element in the form of a double-stranded nucleic acid sequence. In the field of genetic engineering these plasmids are routinely subjected to targeted modifications by inserting, for example, genes encoding a resistance against an antibiotic or an herbicide, a gene encoding a target nucleic acid sequence, a localization sequence, a regulatory sequence, a tag sequence, a marker gene, including an antibiotic marker or a fluorescent marker, a sequence, optionally encoding, a readily identifiable and the like. The structural components of the original plasmid, like the origin of replication, are maintained. According to certain embodiments of the present invention, the localization sequence can comprise a nuclear localization sequence (NLS), a plastid localization sequence, preferably a mitochondrion localization sequence or a chloroplast localization sequence. Said localization sequences are available to the skilled person in the field of plant biotechnology. A variety of plasmid vectors for use in different target cells of interest is commercially available and the modification thereof is known to the skilled person in the respective field.

[0066] A “genome” as used herein includes both the genes (the coding regions), the non-coding DNA and, if present, the genetic material of the mitochondria and/or chloroplasts, or the genomic material encoding a virus, or part of a virus. The “genome” or “genetic material” of an organism usually consists of DNA, wherein the genome of a virus may consist of RNA (single-stranded or double stranded).

[0067] The terms “genome editing”, “gene editing” and “genome engineering” are used interchangeably herein and refer to strategies and techniques for the targeted, specific modification of any genetic information or genome of a living organism at at least one position. As such, the terms comprise gene editing, but also the editing of regions other than gene encoding regions of a genome. It further comprises the editing or engineering of the nuclear (if present) as well as other genetic information of a cell. Furthermore, the terms “genome editing”, “gene editing” and “genome engineering” also comprise an epigenetic editing or engineering, i.e. the targeted modification of, e.g. methylation, histone modification or of non-coding RNAs possibly causing heritable changes in gene expression.

[0068] The terms “guide RNA”, “gRNA”, “single guide RNA”, or “sgRNA” are used interchangeably herein and either refer to a synthetic fusion of a CRISPR RNA (crRNA) and a trans-activating crRNA (tracrRNA), or the term refers to a single RNA molecule consisting only of a crRNA and/or a tracrRNA, or the term refers to a gRNA individually comprising a crRNA or a tracrRNA moiety. A tracr and a crRNA moiety, if present as required by the respective CRISPR polypeptide, thus do not necessarily have to be present on one covalently attached RNA molecule, yet they can also be comprised by two individual RNA molecules, which can associate or can be associated by non-covalent or covalent interaction to provide a gRNA according to the present disclosure. In the case of single RNA-guided endonucleases like Cpf1 (see Zetsche et al., 2015, supra), for example, a crRNA as single guide nucleic acid sequence might be sufficient for mediating DNA targeting.

[0069] The term “hybridization” as used herein refers to the pairing of complementary nucleic acids, i.e., DNA and/or RNA, using any process by which a strand of nucleic acid joins with a complementary strand through base pairing to form a hybridized complex. Hybridization and the strength of hybridization (i.e., the strength of the association between the nucleic acids) is impacted by such factors as the degree and length of complementarity between the nucleic acids, stringency of the conditions involved, the melting temperature (Tm) of the formed hybrid, and the G:C ratio within the nucleic acids. The term hybridized complex refers to a complex formed between two nucleic acid sequences by virtue of the formation of hydrogen bonds between complementary G and C bases and between complementary A and T/U bases. A hybridized complex or a corresponding hybrid construct can be formed between two DNA nucleic acid molecules, between two RNA nucleic acid molecules or between a DNA and an RNA nucleic acid molecule. For all constellations, the nucleic acid molecules can be naturally occurring nucleic acid molecules generated in vitro or in vivo and/or artificial or synthetic nucleic acid molecules. Hybridization as detailed above, e.g., Watson-Crick base pairs, which can form between DNA, RNA and DNA/RNA sequences, are dictated by a specific hydrogen bonding pattern, which thus represents a non-covalent attachment form according to the present invention. In the context of hybridization, the term “stringent hybridization conditions” should be understood to mean those conditions under which a hybridization takes place primarily only between homologous nucleic acid molecules. The term “hybridization conditions” in this respect refers not only to the actual conditions prevailing during actual agglomeration of the nucleic acids, but also to the conditions prevailing during the subsequent washing steps. Examples of stringent hybridization conditions are conditions under which primarily only those nucleic acid molecules that have at least 75%, preferably at least 80%, at least 85%, at least 90%, at least 91%, at least 92%, at least 93%, at least 94%, at least 95%, at least 96%, at least 97%, at least 98%, at least 99%, or at least 99.5% sequence identity undergo hybridization. Stringent hybridization conditions are, for example: 4×SSC at 65° C. and subsequent multiple washes in 0.1×SSC at 65° C. for approximately 1 hour. The term “stringent hybridization conditions” as used herein may also mean: hybridization at 68° C. in 0.25 M sodium phosphate, pH 7.2, 7% SDS, 1 mM EDTA and 1% BSA for 16 hours and subsequently washing twice with 2×SSC and 0.1% SDS at 68° C. Preferably, hybridization takes place under stringent conditions.

[0070] The terms “nucleotide” and “nucleic acid” with reference to a sequence or a molecule are used interchangeably herein and refer to a single- or double-stranded DNA or RNA of natural or synthetic origin. The term nucleotide sequence is thus used for any DNA or RNA sequence independent of its length, so that the term comprises any nucleotide sequence comprising at least one nucleotide, but also any kind of larger oligonucleotide or polynucleotide. The term(s) thus refer to natural and/or synthetic deoxyribonucleic acids (DNA) and/or ribonucleic acid (RNA) sequences, which can optionally comprise synthetic nucleic acid analoga. A nucleic acid according to the present disclosure can optionally be codon optimized. Codon optimization implies that the codon usage of a DNA or RNA is adapted to that of a cell or organism of interest to improve the transcription rate of said recombinant nucleic acid in the cell or organism of interest. The skilled person is well aware of the fact that a target nucleic acid can be modified at one position due to the codon degeneracy, whereas this modification will still lead to the same amino acid sequence at that position after translation, which is achieved by codon optimization to take into consideration the species-specific codon usage of a target cell or organism. Nucleic acid sequences according to the present application can carry specific codon optimization for the following non limiting list of organisms: Hordeum vulgare, Sorghum bicolor, Secale cereale, Triticale, Saccharum officinarium, Zea mays, Setaria italic, Oryza sativa, Oryza minuta, Oryza australiensis, Oryza alta, Triticum aestivum, Triticum durum, Hordeum bulbosum, Brachypodium distachyon, Hordeum marinum, Aegilops tauschii, Malus domestica, Beta vulgaris, Helianthus annuus, Daucus glochidiatus, Daucus pusillus, Daucus muricatus, Daucus carota, Eucalyptus grandis, Erythranthe guttata, Genlisea aurea, Nicotiana sylvestris, Nicotiana tabacum, Nicotiana tomentosiformis, Nicotiana benthamiana, Solanum lycopersicum, Solanum tuberosum, Coffea canephora, Vitis vinifera, Cucumis sativus, Morus notabilis, Arabidopsis thaliana, Arabidopsis lyrata, Arabidopsis arenosa, Crucihimalaya himalaica, Crucihimalaya wallichfi, Cardamine flexuosa, Lepidium virginicum, Capsella bursa-pastoris, Olmarabidopsis pumila, Arabis hirsuta, Brassica napus, Brassica oleracea, Brassica rapa, Brassica juncacea, Brassica nigra, Raphanus sativus, Eruca vesicaria sativa, Citrus sinensis, Jatropha curcas, Glycine max, Gossypium ssp., Populus trichocarpa, Mus musculus, Rattus norvegicus or Homo sapiens.

[0071] The term “particle bombardment” as used herein, also named “biolistic transfection” or “biolistic bombardment” or “microparticle-mediated gene transfer”, refers to a physical delivery method for transferring a coated microparticle or nanoparticle comprising a nucleic acid or a genetic construct of interest into a target cell or tissue. The micro- or nanoparticle functions as projectile and is fired on the target structure of interest under high pressure using a suitable device, often called “gene-gun”. The transformation via particle bombardment uses a microprojectile of metal covered with the gene of interest, which is then shot onto the target cells using an equipment known as “gene-gun” (Sandford et al. 1987) at high velocity fast enough to penetrate the cell wall of a target tissue, but not harsh enough to cause cell death. For protoplasts, which have their cell wall entirely removed, the conditions are different logically. The precipitated nucleic acid or the genetic construct on the at least one microprojectile is released into the cell after bombardment, and integrated into the genome or expressed transiently according to the definition given above. The acceleration of microprojectiles is accomplished by a high voltage electrical discharge or compressed gas (helium). Concerning the metal particles used it is mandatory that they are non-toxic, non-reactive, and that they have a smaller diameter than the target cell. The most commonly used are gold or tungsten. There is plenty of information publicly available from the manufacturers and providers of gene-guns and associated system concerning their general use.

[0072] The terms “plant” or “plant cell” as used herein refer to a plant organism, a plant organ, differentiated and undifferentiated plant tissues, plant cells, seeds, and derivatives and progeny thereof. Plant cells include without limitation, for example, cells from seeds, from mature and immature embryos, meristematic tissues, seedlings, callus tissues in different differentiation states, leaves, flowers, roots, shoots, male or female gametophytes, sporophytes, pollen, pollen tubes and microspores, protoplasts, macroalgae and microalgae. The different eukaryotic cells, for example, animal cells, fungal cells or plant cells, can have any degree of ploidity, i.e. they may either be haploid, diploid, tetraploid, hexaploid or polyploid.

[0073] The term “regulatory sequence” or “regulatory element” as used herein refers to a nucleic acid or an amino acid sequence, which can direct the transcription and/or translation and/or modification of a nucleic acid sequence of interest in a genome or genetic material of interest, either in cis or in trans. Such elements may include promoters, including core promoter elements or core promoter motifs, leader sequences, enhancers, silencer elements, introns, transcription termination regions (terminators), and untranslated regions upstream and downstream of a coding sequence. A “regulatory sequence” as understood according to the present disclosure may thus also comprise a part of a regulatory sequence or a regulatory element, which can influence, i.e., up- or down-regulate or shut-off, the activity of a native regulatory sequence or element, when introduced into a given regulatory sequence or element.

[0074] The terms “RNA interference” or “RNAi” as used herein interchangeably refer to a gene down-regulation mechanism meanwhile demonstrated to exist in all eukaryotes. The mechanism was first recognized in plants where it was called “post-transcriptional gene silencing” or “PTGS”. In RNAi, small RNAs (of about 21-24 nucleotides) function to guide specific effector proteins (e.g., members of the Argonaute protein family) to a target nucleotide sequence by complementary base pairing. The effector protein complex then down-regulates the expression of the targeted RNA or DNA. Small RNA-directed gene regulation systems were independently discovered (and named) in plants, fungi, worms, flies, and mammalian cells. Collectively, PTGS, RNA silencing, and co-suppression (in plants); quelling (in fungi and algae); and RNAi (in Caenorhabditis elegans, Drosophila, and mammalian cells) are all examples of small RNA-based gene regulation systems.

[0075] A “site-specific nuclease” or “SSN” as used herein refers to at least one usually genetically engineered nuclease or a catalytically active fragment thereof, or the corresponding sequence encoding the same, which acts as an enzyme catalyzing a site-specific and not random double stand break (DSB) or a single strand nick at a desired location of a genome or genomic sequence of interest in a precise way. DNA binding, recognition and cleavage capabilities of the SSNs according to the present disclosure may vary depending on the functional class of a SSN of interest.

[0076] A “transgene” or “transgenic sequence” as used herein refers to a gene, or part of a gene including the regulatory sequences thereof and introns, which has been artificially transferred from a donor genome to an acceptor genome or system. A “transgenic sequence” may thus be understood as a sequence foreign to the species the acceptor cell or genome belongs to.

[0077] A “cisgene” or “cisgenic sequence” as used herein refers to a gene, or part of a gene including the regulatory sequences thereof and introns, which has been artificially transferred from a donor genome to an acceptor genome or system. A “cisgenic sequence” may thus be understood as a sequence from the same species being transferred to another individual of the same species or to another cell of the same species.

[0078] The terms “transient” or “transient introduction” as used herein refer to the transient introduction of at least one nucleic acid and/or amino acid sequence according to the present disclosure, preferably incorporated into a delivery vector and/or into a recombinant construct, with or without the help of a delivery vector, into a target structure, for example, a plant cell, wherein the at least one nucleic acid sequence is introduced under suitable reaction conditions so that no integration of the at least one nucleic acid sequence into the endogenous nucleic acid material of a target structure, the genome as a whole, occurs, so that the at least one nucleic acid sequence will not be integrated into the endogenous DNA of the target cell. As a consequence, in the case of transient introduction, the introduced genetic construct will not be inherited to a progeny of the target structure, for example a prokaryotic, an animal or a plant cell. The at least one nucleic acid and/or amino acid sequence or the products resulting from transcription, translation, processing, post-translational modifications or complex building thereof are only present temporarily, i.e., in a transient way, in constitutive or inducible form, and thus can only be active in the target cell for exerting their effect for a limited time. Therefore, the at least one sequence introduced via transient introduction will not be heritable to the progeny of a cell. The effect mediated by at least one sequence or effector introduced in a transient way can, however, potentially be inherited to the progeny of the target cell.

[0079] A “variant” of any site-specific nuclease disclosed herein represents a molecule comprising at least one mutation, deletion or insertion in comparison to the wild-type site-specific nuclease to alter the activity of the wild-type nuclease as naturally occurring. A “variant” can, as non-limiting example, be a catalytically inactive Cas9 (dCas9), or a site-specific nuclease, which has been modified to function as nickase.

[0080] Whenever the present disclosure relates to the percentage of identity of nucleic acid or amino acid sequences to each other these values define those values as obtained by using the EMBOSS Water Pairwise Sequence Alignments (nucleotide) programme (www.ebi.ac.uk/Tools/psa/emboss_water/nucleotide.html) nucleic acids or the EMBOSS Water Pairwise Sequence Alignments (protein) programme (www.ebi.ac.uk/Tools/psa/emboss_water/) for amino acid sequences. Alignments or sequence comparisons as used herein refer to an alignment over the whole length of two sequences compared to each other. Those tools provided by the European Molecular Biology Laboratory (EMBL) European Bioinformatics Institute (EBI) for local sequence alignments use a modified Smith-Waterman algorithm (see www.ebi.ac.uk/Tools/psa/and Smith, T. F. & Waterman, M. S. “Identification of common molecular subsequences” Journal of Molecular Biology, 1981 147 (1):195-197). When conducting an alignment, the default parameters defined by the EMBL-EBI are used. Those parameters are (i) for amino acid sequences: Matrix=BLOSUM62, gap open penalty=10 and gap extend penalty=0.5 or (ii) for nucleic acid sequences: Matrix=DNAfull, gap open penalty=10 and gap extend penalty=0.5.

### DETAILED DESCRIPTION

[0081] The multi-step NHEJ pathway is mediated by a number of highly conserved enzymes required for completion of double-strand break (DSB) repair by this mechanism. Knock-outs or knock-downs of any of these essential enzymes impair the ability of cells to use the NHEJ pathway. Impaired function of NHEJ tends to favor HDR as a partially compensatory mechanism to preserve a cell's aim to achieve chromosomal integrity in the presence of DSBs.

[0082] The present invention is thus in part based on the discovery that cells or cellular systems showing inhibited expression of POLQ and one of several enzymes essential for NHEJ repair (e.g., LigIV, Ku70, Ku80 and further enzymes disclosed herein) just simultaneously when performing targeted genome editing (GE) in exactly this cell or cellular system exhibit dominance of HR-mediated DSB repair with no random integration of supplied repair template(s) (RT). The findings on relevant NHEJ/H(D)R players and their inhibition were combined with and exploited for highly efficient gene targeting, as the absence of random RT integration and of NHEJ-mediated DSB repair guarantees a significantly improved precision and predictability of any GE experiment, in particular in eukaryotic cells and systems. The present invention thus provides methods to perform a targeted NHEJ pathway knock-out or knock-down simultaneous with performing GE so that it can be assured that NHEJ enzymes responsible for imprecise DSB repair after a DSB break will not be active in one cell or cellular system of interest, exactly at the time point a GE event including DSB and repair is to be effected in said one cell or cellular system.

[0083] The present invention discloses methods for efficient gene targeting in cells, preferably eukaryotic cells, and more preferably plant cells. Fundamentally, the methods rely on the provision of a reduced or abolished expression of Pol theta and at least one further enzyme essential for NHEJ repair which allows to perform gene targeting in a highly precise manner in one and the same cell. In a cell or a cellular system in which the enzyme Pol theta and at least one further NHEJ enzyme are (partially) inactivated, genomic double-strand breaks are predominantly repaired by HR. Such a cell or cellular system will thus allow for highly predictable Gene Editing when transformed with an RT.

[0084] In a first aspect, there is thus provided a method for modifying the genetic material of a cellular system at a predetermined location with at least one nucleic acid sequence of interest, wherein the method comprises the following steps: (a) providing a cellular system comprising a Polymerase theta enzyme, or a sequence encoding the same, and one or more further enzyme(s) of a NHEJ pathway, or the sequence(s) encoding the same; (b) inactivating or partially inactivating the Polymerase theta enzyme, or the sequence encoding the same, and inactivating or partially inactivating the one or more further DNA repair enzyme(s) of a NHEJ pathway, or the sequence(s) encoding the same; (c) introducing into the cellular system or a progeny system thereof (i) the at least one nucleic acid sequence of interest, optionally flanked by one or more homology sequence(s) complementary to one or more nucleic acid sequence(s) adjacent to the predetermined location, and (ii) at least one site-specific nuclease, or a sequence encoding the same, the site-specific nuclease inducing a double-strand break at the predetermined location; and (d) optionally: determining the presence of the modification at the predetermined location in the genetic material of the cellular system; (e) obtaining a cellular system comprising a modification at the predetermined location of the genetic material of the cellular system or selecting a cellular system comprising a modification at the predetermined location of the genetic material of the cellular system based on the determination of (d).

[0085] Notably, in one embodiment, steps (b) and (c) may be performed simultaneous. Depending on the mode of inactivation or partial inactivation as disclosed in step (b) of the above aspect, step (b) may be performed before step (c). Vice versa step (c) can also be performed before step (b). In one embodiment, the introduction of at least one nucleic acid sequence of interest and the introduction of at least one site-specific nuclease, or a sequence encoding the same may be performed simultaneously or in any sequential order in relation to each other and further in relation to the step of inactivation or partial inactivation of Polymerase theta enzyme, or a sequence encoding the same, and/or one or more further enzyme(s) of a NHEJ pathway, or the sequence(s) encoding the same. The sequential and temporal order of method steps will depend on the nature of the material to be introduced and the mode of inactivation, respectively. For example, when performing a knock-out or inactivation of the Polymerase theta enzyme, and/or the one or more further enzyme(s) of a NHEJ pathway this step will likely precede the subsequent method steps. In other embodiments, a transient (partial) inactivation may be more suitable. In this embodiment, step (b) can be conducted simultaneously with, or temporally even after any one of steps (c)(i) or (c)(ii) is performed.

[0086] For all aspects and embodiments according to the present invention it is of importance that the (partial) inactivation as detailed in step (b) of the first aspect of the present invention and the introduction of at least one site-specific nuclease, or a sequence encoding the same, is planned in a manner so that it can be guaranteed that one and the same cell, or one and the same cellular system comprising the genetic material to be modified will simultaneously comprise both, A) the (partially) inactivated Pol theta and the at least one further (partially) inactivated NHEJ enzyme as well as B) the (active) at least one site-specific nuclease and the at least one nucleic acid sequence of interest in one and the same cell or cellular system to achieve a significantly improved and more precise GE, as the imprecise NHEJ pathway will be (partially) inactivated in a spatio-temporal manner so that GE can be performed without inserting unwanted nucleotides at the site of a DSB induced in a targeted way.

[0087] The main contribution of the present invention is thus the provision of methods and the material as obtained by said methods, wherein NHEJ pathways significantly hampering a targeted GE event mediated by HDR are (partially) inactivated exactly at the time point and in the same cellular system and compartment thereof needed, when inducing GE to obtain optimum GE results without an undesired outcome.

[0088] A “modification” or “modifying” a genetic material according to the present disclosure implies any kind of insertion, deletion, and/or replacement of at least one nucleic acid sequence of interest effected at a predetermined location in a genome or a genetic material of interest.

[0089] A “cellular system” as used herein refers to at least one element comprising all or part of the genome of a cell of interest to be modified. The cellular system may thus be any in vivo or in vitro system, including also a cell-free system. The cellular system thus comprises and provides the target genome or genomic sequence to be modified in a suitable way, i.e., in a form accessible to a genetic modification or manipulation. The cellular system may thus be selected from, for example, a prokaryotic or eukaryotic cell, including an animal or a plant cell, a prokaryotic or eukaryotic organism, including an animal or plant, or the cellular system may comprise a genetic construct as defined above comprising all or parts of the genome of a prokaryotic or eukaryotic cell to be modified in a highly targeted way. The cellular system may be provided as isolated cell or vector, or the cellular system may be comprised by a network of cells in a tissue, organ, material or whole organism, either in vivo or as isolated system in vitro. In this context, the “genetic material” of a cellular system can thus be understood as all, or part of the genome of an organism the genetic material of which organism as a whole or in part is present in the cellular system to be modified.

[0090] In one aspect, the present invention provides a cellular system which may be obtained by a method according to any one of the above aspects and embodiments.

[0091] In one embodiment, the cellular system may comprise an inactivated or partially inactivated Polymerase theta (Pol theta) enzyme and one or more further inactivated or partially inactivated DNA repair enzyme(s) of a NHEJ pathway, wherein the modified cellular system may be selected from the group consisting of one or more plant cell(s), a plant, and parts of a plant.

[0092] A “partial” inactivation in this context implies a reduced activity of the Pol theta and/or of the further DNA repair enzyme(s) of a NHEJ pathway in comparison to the enzymatic activity of the respective wild-type enzyme not partially inactivated measured under the same conditions in vivo or in vitro. An “inactivation” thus implies a complete, or almost complete, loss of enzymatic activity. Partial and full inactivation may be temporally limited. According to the present invention, the relevant time point for providing a state of a (partial) inactivation is the time point when GE including DSB induction and targeted repair is performed.

[0093] In one embodiment according to the various aspects disclosed herein for providing a cellular system comprising a modified genetic material, the one or more part(s) of the plant may be selected from the group consisting of leaves, stems, roots, emerged radicles, flowers, flower parts, petals, fruits, pollen, pollen tubes, anther filaments, ovules, embryo sacs, egg cells, ovaries, zygotes, embryos, zygotic embryos, somatic embryos, apical meristems, vascular bundles, pericycles, seeds, roots, and cuttings.

[0094] In another embodiment according to the various aspects disclosed herein, there is provided a cellular system, wherein the one or more plant cell(s), the plant(s) or the part(s) of a plant may originate from a plant species selected from the group consisting of: Hordeum vulgare, Hordeum bulbusom, Sorghum bicolor, Saccharum officinarium, Zea mays, Setaria italica, Oryza minuta, Oriza sativa, Oryza australiensis, Oryza alta, Triticum aestivum, Secale cereale, Malus domestica, Brachypodium distachyon, Hordeum marinum, Aegilops tauschii, Daucus glochidiatus, Beta vulgaris, Daucus pusillus, Daucus muricatus, Daucus carota, Eucalyptus grandis, Nicotiana sylvestris, Nicotiana tomentosiformis, Nicotiana tabacum, Solanum lycopersicum, Solanum tuberosum, Coffea canephora, Vitis vinifera, Erythrante guttata, Genlisea aurea, Cucumis sativus, Morus notabilis, Arabidopsis arenosa, Arabidopsis lyrata, Arabidopsis thaliana, Crucihimalaya himalaica, Crucihimalaya wallichii, Cardamine flexuosa, Lepidium virginicum, Capsella bursa pastoris, Olmarabidopsis pumila, Arabis hirsute, Brassica napus, Brassica oeleracia, Brassica rapa, Raphanus sativus, Brassica juncea, Brassica nigra, Eruca vesicaria subsp. sativa, Citrus sinensis, Jatropha curcas, Populus trichocarpa, Medicago truncatula, Cicer yamashitae, Cicer bijugum, Cicer arietinum, Cicer reticulatum, Cicer judaicum, Cajanus cajanifolius, Cajanus scarabaeoides, Phaseolus vulgaris, Glycine max, Astragalus sinicus, Lotus japonicas, Torenia fournieri, Allium cepa, Allium fistulosum, Allium sativum, and Allium tuberosum.

[0095] A “homology sequence”, if present, may be part of the at least one nucleic acid sequence of interest according to the various embodiments of the present invention, to be introduced to modify the genetic material of a cellular system according to the present disclosure. Therefore, the at least one homology sequence is physically associated with the at least one nucleic acid sequence of interest within one molecule. As such, the homology sequence may be part of the at least one nucleic acid sequence of interest to be introduced and it may be positioned within the 5′ and/or 3′ position of the at least one nucleic acid sequence of interest, optionally including at least one spacer nucleotide, or within the at least one nucleic acid sequence of interest to be introduced. As such, the homology sequence(s) serve as templates to mediate homology-directed repair by having complementarity to at least one region, the upstream and/or the downstream region, adjacent to the predetermined location within the genetic material of the cellular system to be modified. The at least one nucleic acid sequence of interest and the flanking one or more homology region(s) thus can have the function of a repair template (RT) nucleic acid sequence. In certain embodiments, the RT may be further associated with another DNA and/or RNA sequence as mediated by complementary base pairing. In an alternative embodiment the RT may be associated with other sequence, for example, sequences of a vector, e.g., a plasmid vector, which vector can be used to amplify the RT prior to transformation. Furthermore, the RT may also be physically associated with at least part of an amino acid component, preferably a site-specific nuclease. This configuration and association allows the availability of the RT in close physical proximity to the site of a DSB, i.e., exactly at the position a targeted GE event is to be effected to allow even higher efficiency rates. For example, the at least one RT may also be associated with at least one gRNA interacting with the at least one RT and further interacting with at least one portion of a CRISPR nuclease as site-specific nuclease.

[0096] The one or more homology region(s) will each have a certain degree of complementarity to the respective region flanking the at least one predetermined location upstream and/or downstream of the double-strand break induced by the at least one site-specific nuclease, i.e., the upstream and downstream adjacent region, respectively. Preferably, the one or more homology region(s) will hybridize to the upstream and/or downstream adjacent region under conditions of high stringency. The longer the at least one homology region, the lower the degree of complementarity may be. The complementarity is usually calculated over the whole length of the respective region of homology. In case only one homology region is present, this single homology region will usually have a higher degree of complementarity to allow hybridization. Complementarity under stringent hybridization conditions will be at least 85%, at least 90%, at least 91%, at least 92%, at least 93%, at least 94%, at least 95%, at least 96%, and preferably at least 97%, at least 98%, at least 99%, at least 99.5% or even 100%. At least in the region directly flanking a DSB induced (about 5 to 10 bp upstream and downstream of a DSB), complementarities of at least 98%, at least 99%, at least 99.5% and preferably 100% should be present. Notably, as further disclosed herein below, the degree of complementarity can also be lower than 85%. This will largely depend on the target genetic material and the complexity of the genome it is derived from, the length of the nucleic acid sequence of interest to be introduced, the length and nature of the further homology arm or flanking region, the relative position and orientation of the flanking region in relation to the site at least one DSB is induced, and the like.

[0097] The term “adjacent” or “adjacent to” as used herein in the context of the predetermined location and the one or more homology region(s) may comprise an upstream and a downstream adjacent region, or both. Therefore, the adjacent region is determined based on the genetic material of a cellular system to be modified, said material comprising the predetermined location.

[0098] There may be an upstream and/or downstream adjacent region near the predetermined location. For site-specific nucleases (SSNs) inducing blunt double-strand breaks (DSBs), the “predetermined location” will represent the site the DSB is induced within the genetic material in a cellular system of interest. For SSNs leaving overhangs after DSB induction, the predetermined location means the region between the cut in the 5′ end on one strand and the 3′ end on the other strand. The adjacent regions in the case of sticky end SSNs thus may be calculated using the two different DNA strands as reference. The term “adjacent to a predetermined location” thus may imply the upstream and/or downstream nucleotide positions in a genetic material to be modified, wherein the adjacent region is defined based on the genetic material of a cellular system before inducing a DSB or modification. Based on the different mechanisms of SSNs inducing DSBs, the “predetermined location” meaning the location a modification is made in a genetic material of interest may thus imply one specific position on the same strand for blunt DSBs, or the region on different strands between two cut sites for sticky cutting DSBs, or for nickases used as SSNs between the cut at the 5′ position in one strand and at the 3′ position in the other strand.

[0099] If present, the upstream adjacent region defines the region directly upstream of the 5′ end of the cutting site of a site-specific nuclease of interest with reference to a predetermined location before initiating a double-strand break, e.g., during targeted genome engineering. Correspondingly, a downstream adjacent region defines the region directly downstream of the 3′ end of the cutting site of a SSN of interest with reference to a predetermined location before initiating a double-strand break, e.g., during targeted genome engineering. The 5′ end and the 3′ end can be the same, depending on the site-specific nuclease of interest.

[0100] In certain embodiments, it may also be favorable to design at least one homology region in a distance away from the DSB to be induced, i.e., not directly flanking the predetermined location/the DSB site. In this scenario, the genomic sequence between the predetermined location and the homology sequence (the homology arm) would be “deleted” after homologous recombination had occurred, which may be preferred for certain strategies as this allows the targeted deletion of sequences near the DSB. Different kinds of RT configuration and design are thus contemplated according to the present invention for those embodiments relying on a RT. RTs may be used to introduce site-specific mutations, or RTs may be used for the site-specific integration of nucleic acid sequences of interest, or RTs may be used to assist a targeted deletion.

[0101] A “homology sequence(s)” introduced and the corresponding “adjacent region(s)” can each have varying and different length from about 15 bp to about 15.000 bp, i.e., an upstream homology region can have a different length in comparison to a downstream homology region. Only one homology region may be present. There is no real upper limit for the length of the homology region(s), which length is rather dictated by practical and technical issues. According to certain embodiments, depending on the nature of the RT and the targeted modification to be introduced, asymmetric homology regions may be preferred, i.e., homology regions, wherein the upstream and downstream flanking regions have varying length. In certain embodiments, only one upstream and downstream flanking region may be present.

[0102] Based on the above, a “predetermined location” according to the present invention means the location or site in a genetic material in a cellular system, or within a genome of a cell of interest to be modified, where a targeted edit or modification is to be introduced. In certain embodiments, the predetermined location may thus coincide with the DSB induced by the at least one site-specific nuclease, wherein in other embodiments, the predetermined location may comprise the site of the DSB induced without directly aligning with the cut sites of the at least one site-specific nuclease. In yet a further embodiment, the predetermined location may be away from, i.e., at a certain distance to the DSB site. Depending on the nature of the modification to be introduced this may be the case for embodiments, wherein a RT is used comprising at least one homology region aligning at a certain distance from the site of a DSB induced, or spanning the DSB site, and not directly aligning with the upstream and the downstream region of an induced DSB.

[0103] In one embodiment according to the various aspects of the present invention, the method may comprise an additional step of: (f) restoring the activity of the inactivated or partially inactivated Polymerase theta enzyme and/or restoring the activity of the one or more further inactivated or partially inactivated DNA repair enzyme(s) of a NHEJ pathway in the cellular system comprising a modification at the predetermined location, or in a progeny system thereof.

[0104] Restoration of the at least one NHEJ enzyme (partially) inactivated may be advantageous to provide a cellular system, a cell, a tissue, an organ, or a whole organism, preferably a plant or an animal, wherein the natural NHEJ pathways are fully active to fulfill their inherent functions in naturally occurring DNA damage to preserve genome integrity. It has to be emphasized that in certain embodiments according to the present invention, the cellular systems or the cell to be modified, i.e. the cell, where at least one NHEJ pathway is (partially) inactivated exactly when a GE event is introduced, will have the capacity to be cultivated, or to develop into an organism. In particular for embodiments, wherein the cellular system is, or is derived from a plant cell, including cells from seeds, from mature and immature embryos, meristematic tissues, seedlings, callus tissues in different differentiation states, leaves, flowers, roots, shoots, male or female gametophytes, sporophytes, pollen, pollen tubes and microspores, protoplasts, macroalgae and microalgae, wherein the different plant cells can have any degree of ploidity, i.e. they may either be haploid, diploid, tetraploid, hexaploid or polyploidy, the cellular system modified according to the present invention will be used to develop a whole plant organism. Using techniques known to the skilled person, a plant can be crossed with other plants to possibly restore the activity of at least one Pol theta enzyme and/or the activity of at least one further NHEJ pathway enzyme using suitable breeding strategies.

[0105] In one embodiment according to the various aspects of the present invention, the Polymerase theta to be inactivated or partially inactivated may comprise an amino acid sequence according to SEQ ID NO: 2, 7, 8, 9 or 10, or an amino acid sequence having at least 75%, 76%, 77%, 78%, 79%, 80%, 81%, 82%, 83%, 84%, 85%, 86%, 87%, 88%, 89%, 90%, 91%, 92%, 93%, 94%, 95%, 96%, 97%, 98%, or 99% sequence identity to the sequence set forth in SEQ ID NO: 2, 7, 8, 9 or 10, respectively, preferably over the entire length of the sequence; or it may be encoded by the nucleic acid sequence according to SEQ ID NO: 1, 3, 4, 5 or 6, or a nucleic acid having at least 75%, 76%, 77%, 78%, 79%, 80%, 81%, 82%, 83%, 84%, 85%, 86%, 87%, 88%, 89%, 90%, 91%, 92%, 93%, 94%, 95%, 96%, 97%, 98%, or 99% sequence identity to the sequence set forth in SEQ ID No: 1, 3, 4, 5 or 6, respectively, preferably over the entire length of the sequence; or it may be encoded by a nucleic acid sequence hybrizing to a nucleic acid sequence complementary to the nucleic acid sequence according to SEQ ID NO: 1, 3, 4, 5 or 6 under stringent conditions.

[0106] In yet a further embodiment according to the various aspects of the present invention, the one or more further DNA repair enzyme(s) of a NHEJ pathway to be inactivated or partially inactivated may be independently selected from the group consisting of Ku70, Ku80, DNA-dependent protein kinase, Ataxia telangiectasia mutated (ATM), ATM—and Rad3—related (ATR), Artemis, XRCC4, DNA ligase IV (LigIV) and XLF, or any combination thereof.

[0107] In one embodiment according to the various aspects of the present invention, at least one, at least two, at least three, or at least four further DNA repair enzymes of a NHEJ pathway may be inactivated or partially inactivated, preferably wherein at least Ku70 and DNA ligase IV, or wherein at least Ku80 and DNA ligase IV may be inactivated or partially inactivated.

[0108] In another embodiment according to the various aspects of the present invention, one, two, three, or four, preferably solely one, solely two, solely three or solely four, further DNA repair enzymes of a NHEJ pathway may be inactivated or partially inactivated, preferably wherein the Ku70 and DNA ligase IV, or wherein the Ku80 and DNA ligase IV may be inactivated or partially inactivated.

[0109] In one embodiment according to the various aspects of the present invention, the one or more further DNA repair enzyme(s) of a NHEJ pathway to be inactivated or partially inactivated may be Ku70, or a nucleic acid sequence encoding the same, wherein the Ku70 may comprise an amino acid sequence according to SEQ ID NO: 12, 18, 19 or 20, or an amino acid sequence having at least 75%, 76%, 77%, 78%, 79%, 80%, 81%, 82%, 83%, 84%, 85%, 86%, 87%, 88%, 89%, 90%, 91%, 92%, 93%, 94%, 95%, 96%, 97%, 98%, or 99% sequence identity to the sequence set forth in SEQ ID NO: 12, 18, 19 or 20, respectively, preferably over the entire length of the sequence, or the nucleic acid sequence encoding the same may comprise a nucleic acid sequence according to SEQ ID NO: 11, 13, 14, 15, 16 or 17, or may comprise a nucleic acid sequence having at least 75%, 76%, 77%, 78%, 79%, 80%, 81%, 82%, 83%, 84%, 85%, 86%, 87%, 88%, 89%, 90%, 91%, 92%, 93%, 94%, 95%, 96%, 97%, 98%, or 99% sequence identity to the sequence set forth in SEQ ID NO: 11, 13, 14, 15, 16 or 17, respectively, preferably over the entire length of the sequence, or may comprise a nucleic acid sequence hybridizing to a nucleic acid sequence complementary to the nucleic acid sequence according to SEQ ID NO: 11, 13, 14, 15, 16 or 17.

[0110] In a further embodiment, wherein the one or more further DNA repair enzyme(s) of a NHEJ pathway to be inactivated or partially inactivated may be Ku80, or a nucleic acid sequence encoding the same, wherein the Ku80 may comprise an amino acid sequence according to SEQ ID NO: 22, 23, 24 or 29, or an amino acid sequence having at least 75%, 76%, 77%, 78%, 79%, 80%, 81%, 82%, 83%, 84%, 85%, 86%, 87%, 88%, 89%, 90%, 91%, 92%, 93%, 94%, 95%, 96%, 97%, 98%, or 99% sequence identity to the sequence set forth in SEQ ID NO: 22, 23, 24 or 29, respectively, preferably over the entire length of the sequence, or the nucleic acid sequence encoding the same may comprise a sequence according to SEQ ID NO: 21, 25, 26, 27 or 28, or a nucleic acid sequence having at least 75%, 76%, 77%, 78%, 79%, 80%, 81%, 82%, 83%, 84%, 85%, 86%, 87%, 88%, 89%, 90%, 91%, 92%, 93%, 94%, 95%, 96%, 97%, 98%, or 99% sequence identity to the sequence set forth in SEQ ID NO: 21, 25, 26, 27 or 28, respectively, preferably over the entire length of the sequence, or may comprise a nucleic acid sequence hybridizing to a nucleic acid sequence complementary to the nucleic acid sequence according to SEQ ID NO: 21, 25, 26, 27 or 28.

[0111] In a further embodiment, wherein the one or more further DNA repair enzyme(s) of a NHEJ pathway to be inactivated or partially inactivated may be DNA-dependent protein kinase, or a nucleic acid sequence encoding the same, the DNA-dependent protein kinase may comprise an amino acid sequence according to SEQ ID NO: 32, 33 or 35, or an amino acid sequence having at least 75%, 76%, 77%, 78%, 79%, 80%, 81%, 82%, 83%, 84%, 85%, 86%, 87%, 88%, 89%, 90%, 91%, 92%, 93%, 94%, 95%, 96%, 97%, 98%, or 99% sequence identity to the sequence set forth in SEQ ID NO: 32, 33 or 35, respectively, preferably over the entire length of the sequence, or the nucleic acid sequence encoding the same may comprise a sequence according to SEQ ID NO: 30, 31 or 34, or a nucleic acid sequence having at least 75%, 76%, 77%, 78%, 79%, 80%, 81%, 82%, 83%, 84%, 85%, 86%, 87%, 88%, 89%, 90%, 91%, 92%, 93%, 94%, 95%, 96%, 97%, 98%, or 99% sequence identity to the sequence set forth in SEQ ID NO: 30, 31 or 34, respectively, preferably over the entire length of the sequence, or may comprise a nucleic acid sequence hybridizing to a nucleic acid sequence complementary to the nucleic acid sequence according to SEQ ID NO: 30, 31 or 34.

[0112] In yet a further embodiment, wherein the one or more further DNA repair enzyme(s) of a NHEJ pathway to be inactivated or partially inactivated may be ATM, or a nucleic acid sequence encoding the same, the ATM may comprise an amino acid sequence according to SEQ ID NO: 37, 38, 39, 41, 42, 43, 44, 45, 46, 47 or 48, or an amino acid sequence having at least 75%, 76%, 77%, 78%, 79%, 80%, 81%, 82%, 83%, 84%, 85%, 86%, 87%, 88%, 89%, 90%, 91%, 92%, 93%, 94%, 95%, 96%, 97%, 98%, or 99% sequence identity to the sequence set forth in SEQ ID NO: 37, 38, 39, 41, 42, 43, 44, 45, 46, 47 or 48, respectively, preferably over the entire length of the sequence, or the nucleic acid sequence encoding the same may comprise a sequence according to SEQ ID NO: 36 or 40, or a nucleic acid sequence having at least 75%, 76%, 77%, 78%, 79%, 80%, 81%, 82%, 83%, 84%, 85%, 86%, 87%, 88%, 89%, 90%, 91%, 92%, 93%, 94%, 95%, 96%, 97%, 98%, or 99% sequence identity to the sequence set forth in SEQ ID NO: 36 or 40, respectively, preferably over the entire length of the sequence, or may comprise a nucleic acid sequence hybridizing to a nucleic acid sequence complementary to the nucleic acid sequence according to SEQ ID NO: 36 or 40.

[0113] In still a further embodiment, wherein the one or more further DNA repair enzyme(s) of a NHEJ pathway to be inactivated or partially inactivated may be ATM—and Rad3—related (ATR), or a nucleic acid sequence encoding the same, the ATR may comprise an amino acid sequence according to SEQ ID NO: 50, 51, 52, 53, 55 or 56, or an amino acid sequence having at least 75%, 76%, 77%, 78%, 79%, 80%, 81%, 82%, 83%, 84%, 85%, 86%, 87%, 88%, 89%, 90%, 91%, 92%, 93%, 94%, 95%, 96%, 97%, 98%, or 99% sequence identity to the sequence set forth in SEQ ID NO: 50, 51, 52, 53, 55 or 56, respectively, preferably over the entire length of the sequence, or the nucleic acid sequence encoding the same may comprise a sequence according to SEQ ID NO: 49 or 54, or a nucleic acid sequence having at least 75%, 76%, 77%, 78%, 79%, 80%, 81%, 82%, 83%, 84%, 85%, 86%, 87%, 88%, 89%, 90%, 91%, 92%, 93%, 94%, 95%, 96%, 97%, 98%, or 99% sequence identity to the sequence set forth in SEQ ID NO: 49 or 54, respectively, preferably over the entire length of the sequence, or may comprise a nucleic acid sequence hybridizing to a nucleic acid sequence complementary to the nucleic acid sequence according to SEQ ID NO: 49 or 54.

[0114] In a further embodiment, wherein the one or more further DNA repair enzyme(s) of a NHEJ pathway to be inactivated or partially inactivated may be Artemis, or a nucleic acid sequence encoding the same, the Artemis may comprise an amino acid sequence according to SEQ ID NO: 60, 61, 62 or 64, or an amino acid sequence having at least 75%, 76%, 77%, 78%, 79%, 80%, 81%, 82%, 83%, 84%, 85%, 86%, 87%, 88%, 89%, 90%, 91%, 92%, 93%, 94%, 95%, 96%, 97%, 98%, or 99% sequence identity to the sequence set forth in SEQ ID NO: 60, 61, 62 or 64, respectively, preferably over the entire length of the sequence, or the nucleic acid sequence encoding the same may comprise a sequence according to SEQ ID NO: 57, 58, 59 or 63, or a nucleic acid sequence having at least 75%, 76%, 77%, 78%, 79%, 80%, 81%, 82%, 83%, 84%, 85%, 86%, 87%, 88%, 89%, 90%, 91%, 92%, 93%, 94%, 95%, 96%, 97%, 98%, or 99% sequence identity to the sequence set forth in SEQ ID NO: 57, 58, 59 or 63, respectively, preferably over the entire length of the sequence, or may comprise a nucleic acid sequence hybridizing to a nucleic acid sequence complementary to the nucleic acid sequence according to SEQ ID NO: 57, 58, 59 or 63.

[0115] In another embodiment, wherein the one or more further DNA repair enzyme(s) of a NHEJ pathway to be inactivated or partially inactivated may be XRCC4, or a nucleic acid sequence encoding the same, the XRCC4 may comprise an amino acid sequence according to SEQ ID NO: 66, 67, or 69, or an amino acid sequence having at least 75%, 76%, 77%, 78%, 79%, 80%, 81%, 82%, 83%, 84%, 85%, 86%, 87%, 88%, 89%, 90%, 91%, 92%, 93%, 94%, 95%, 96%, 97%, 98%, or 99% sequence identity to the sequence set forth in SEQ ID NO: 66, 67 or 69, respectively, preferably over the entire length of the sequence, or the nucleic acid sequence encoding the same may comprise a sequence according to SEQ ID NO: 65 or 68, or a nucleic acid sequence having at least 75%, 76%, 77%, 78%, 79%, 80%, 81%, 82%, 83%, 84%, 85%, 86%, 87%, 88%, 89%, 90%, 91%, 92%, 93%, 94%, 95%, 96%, 97%, 98%, or 99% sequence identity to the sequence set forth in SEQ ID NO: 65 or 68, respectively, preferably over the entire length of the sequence, or may comprise a nucleic acid sequence hybridizing to a nucleic acid sequence complementary to the nucleic acid sequence according to SEQ ID NO: 65 or 68.

[0116] In a further embodiment, wherein the one or more further DNA repair enzyme(s) of a NHEJ pathway to be inactivated or partially inactivated may be DNA ligase IV, or a nucleic acid sequence encoding the same, the DNA ligase IV may comprise an amino acid sequence according to SEQ ID NO: 71, 72, 76 or 77, or an amino acid sequence having at least 75%, 76%, 77%, 78%, 79%, 80%, 81%, 82%, 83%, 84%, 85%, 86%, 87%, 88%, 89%, 90%, 91%, 92%, 93%, 94%, 95%, 96%, 97%, 98%, or 99% sequence identity to the sequence set forth in SEQ ID NO: 71, 72, 76 or 77, respectively, preferably over the entire length of the sequence, or the nucleic acid sequence encoding the same may comprise a sequence according to SEQ ID NO: 70, 73, 74 or 75, or a nucleic acid sequence having at least 75%, 76%, 77%, 78%, 79%, 80%, 81%, 82%, 83%, 84%, 85%, 86%, 87%, 88%, 89%, 90%, 91%, 92%, 93%, 94%, 95%, 96%, 97%, 98%, or 99% sequence identity to the sequence set forth in SEQ ID NO: 70, 73, 74 or 75, respectively, preferably over the entire length of the sequence, or may comprise a nucleic acid sequence hybridizing to a nucleic acid sequence complementary to the nucleic acid sequence according to SEQ ID NO: 70, 73, 74 or 75.

[0117] In still another embodiment, the one or more further DNA repair enzyme(s) of a NHEJ pathway to be inactivated or partially inactivated may be XLF, or a nucleic acid sequence encoding the same.

[0118] In certain embodiments, a transient knock-down of at least one Pol theta and the at least one further enzyme of a NHEJ pathway may be preferable, for example, for certain NHEJ enzymes being deleterious to a cell in the homozygous knocked-out stage, so that a transient down-regulation to effect a targeted GE followed by a restoration of the activity of the at least one NHEJ enzyme and/or the Pol theta functionality may be desirable.

[0119] In one embodiment according to the various aspects of the present invention, the at least one nucleic acid sequence of interest may be provided as part of at least one vector, or as at least one linear molecule. In another aspect, the at least one nucleic acid sequence of interest may be provided as a complex, preferably a complex physically associating with the at least one nucleic acid sequence and another RT, and/or with a gRNA, and/or with a site-specific nuclease. The at least one nucleic acid sequence of interest may further comprise a sequence allowing the rapid traceability, including the visual traceability, of the sequence of interest, e.g., a tag, including a fluorescent tag. The at least one nucleic acid sequence of interest may be double-stranded, single-stranded, or a mixture thereof. Furthermore, the at least one nucleic acid sequence of interest may comprise a mixture of DNA and RNA nucleotide, including also synthetic, i.e., non-naturally occurring nucleotides.

[0120] In another embodiment according to the various aspects of the present invention, the at least one vector used according to the various methods disclosed herein may be introduced into the cellular system by biological or physical means, including transfection, transformation, including transformation by Agrobacterium spp., preferably by Agrobacterium tumefaciens, a viral vector, biolistic bombardment, transfection using chemical agents, including polyethylene glycol transfection, or any combination thereof.

[0121] Further provided is an embodiment of the methods according to the various aspects disclosed herein, wherein the at least one site-specific nuclease or a catalytically active fragment thereof, may be introduced into the cellular system as a nucleic acid sequence encoding the site-specific nuclease or the catalytically active fragment thereof, wherein the nucleic acid sequence is part of at least one vector, or wherein the at least one site-specific nuclease or the catalytically active fragment thereof, is introduced into the cellular system as at least one amino acid sequence. In one embodiment, the at least one site-specific nuclease may be introduced as translatable RNA. In yet a further embodiment, the at least one site-specific nuclease may be introduced as part of a complex together with at least one further biomolecule, for example, a gRNA, the gRNA optionally being associated with a RT comprising or being associated with the at least one nucleic acid sequence of interest to be introduced into the cellular system.

[0122] Any suitable delivery method to introduce at least one biomolecule into a cell or cellular system can be applied, depending on the cell or cellular system of interest. The term “introduction” as used herein thus implies a functional transport of a biomolecule or genetic construct (DNA, RNA, single- or double-stranded, protein, comprising natural and/or synthetic components, or a mixture thereof) into at least one cell or cellular system, which allows the transcription and/or translation and/or the catalytic activity and/or binding activity, including the binding of a nucleic acid molecule to another nucleic acid molecule, including DNA or RNA, or the binding of a protein to a target structure within the at least one cell or cellular system, and/or the catalytic activity of an enzyme such introduced, optionally after transcription and/or translation. Where pertinent, a functional integration of a genetic construct may take place in a certain cellular compartment of the at least one cell, including the nucleus, the cytosol, the mitochondrium, the chloroplast, the vacuole, the membrane, the cell wall and the like. Consequently, the term “functional integration”—in contrast to the term implies that the molecular complex of interest is introduced into the at least one cell by any means of transformation, transfection or transduction by biological means, including Agrobacterium transformation, or physical means, including particle bombardment, as well as the subsequent step, wherein the molecular complex exerts its effect within or onto the at least one cell or cellular system in which it was introduced. Depending on the nature of the genetic construct or biomolecule to be introduced, said effect naturally can vary and including, alone or in combination, inter alia, the transcription of a DNA encoded by the genetic construct to a RNA, the translation of an RNA to an amino acid sequence, the activity of an RNA molecule within a cell, comprising the activity of a guide RNA, a crRNA, a tracrRNA, or an miRNA or an siRNA for use in RNA interference, and/or a binding activity, including the binding of a nucleic acid molecule to another nucleic acid molecule, including DNA or RNA, or the binding of a protein to a target structure within the at least one cell, or including the integration of a sequence delivered via a vector or a genetic construct, either transiently or in a stable way. Said effect can also comprise the catalytic activity of an amino acid sequence representing an enzyme or a catalytically active portion thereof within the at least one cell and the like. Said effect achieved after functional integration of the molecular complex according to the present disclosure can depend on the presence of regulatory sequences or localization sequences which are comprised by the genetic construct of interest as it is known to the person skilled in the art.

[0123] Therefore, a variety of suitable delivery techniques may be suitable according to the methods of the present invention for introducing genetic material into a plant cell or a cellular system derived from a plant cell, the delivery methods being known to the skilled person., e.g., by choosing direct delivery techniques ranging from polyethylene glycol (PEG) treatment of protoplasts (Potrykus et al. 1985), procedures like electroporation (D'Halluin et al., 1992), microinjection (Neuhaus et al., 1987), silicon carbide fiber whisker technology (Kaeppler et al., 1992), viral vector mediated approaches (Gelvin, Nature Biotechnology 23, “Viral-mediated plant transformation gets a boost”, 684-685 (2005)) and particle bombardment (see e.g. Sood et al., 2011, Biologia Plantarum, 55, 1-15).

[0124] Despite transformation methods based on biological approaches, like Agrobacterium transformation or viral vector mediated plant transformation, and methods based on physical delivery methods, like particle bombardment or microinjection, have evolved as prominent techniques for introducing genetic material and other biomolecules, including naturally occurring and synthetic biomolecules, or a mixture thereof, into a plant cell or tissue of interest. Helenius et al. (“Gene delivery into intact plants using the Helios™ Gene Gun”, Plant Molecular Biology Reporter, 2000, 18 (3):287-288) discloses a particle bombardment as physical method for introducing material into a plant cell. Currently, there thus exists a variety of plant transformation methods to introduce genetic material in the form of a genetic construct into a plant cell of interest, comprising biological and physical means known to the skilled person on the field of plant biotechnology and which can be applied to introduce at least one gene encoding at least one wall-associated kinase into at least one cell of at least one of a plant cell, tissue, organ, or whole plant. Notably, said delivery methods for transformation and transfection can be applied to introduce the tools of the present invention simultaneously. A common biological means is transformation with Agrobacterium spp. which has been used for decades for a variety of different plant materials. According to the nature of the present invention inter alia relying on a (partially) inactivated Pol theta enzyme, Agrobacterium mediated approaches may also result in a transient introduction of the relevant sequence inserted using Agrobacterium as delivery tool, as T-DNA integration will be hampered.

[0125] Viral vector mediated plant transformation represents a further strategy for introducing genetic material into a cell of interest. Physical means finding application in plant biology are particle bombardment, also named biolistic transfection or microparticle-mediated gene transfer, which refers to a physical delivery method for transferring a coated microparticle or nanoparticle comprising a nucleic acid or a genetic construct of interest into a target cell or tissue. Physical introduction means are suitable to introduce nucleic acids, i.e., RNA and/or DNA, and proteins. Likewise, specific transformation or transfection methods exist for specifically introducing a nucleic acid or an amino acid construct of interest into a plant cell, including electroporation, microinjection, nanoparticles, and cell-penetrating peptides (CPPs). Furthermore, chemical-based transfection methods exist to introduce genetic constructs and/or nucleic acids and/or proteins, comprising inter alia transfection with calcium phosphate, transfection using liposomes, e.g., cationic liposomes, or transfection with cationic polymers, including DEAD-dextran or polyethylenimine, or combinations thereof. Said delivery methods and delivery vehicles or cargos thus inherently differ from delivery tools as used for other eukaryotic cells, including animal and mammalian cells and every delivery method has to be specifically fine-tuned and optimized so that a construct of interest for introducing and/or modifying at least one gene encoding at least one wall-associated kinase in the at least one plant cell, tissue, organ, or whole plant; and/or can be introduced into a specific compartment of a target cell of interest in a fully functional and active way. The above delivery techniques, alone or in combination, can be used for in vivo (in planta) or in vitro approaches. According to the various embodiments of the present invention, different delivery techniques may be combined with each other, for example, using a chemical transfection for the at least one site-specific nuclease, or a mRNA or DNA encoding the same, and optionally further molecules, for example, a gRNA, whereas this is combined with the transient provision of the (partial) inactivation(s) using an Agrobacterium based technique.

[0126] In one embodiment according to the various aspects of the present invention, the at least one nucleic acid sequence of interest to be introduced into a cellular system may be selected from the group consisting of: a transgene, a modified endogenous gene, a synthetic sequence, an intronic sequence, a coding sequence or a regulatory sequence.

[0127] In another embodiment according to the various aspects of the present invention, there is provided a method, wherein the at least one nucleic acid sequence of interest to be introduced into a cellular system is a transgene, wherein the transgene comprises a nucleic acid sequence encoding a gene of a genome of an organism of interest, or at least a part of said gene.

[0128] In one embodiment, a regulatory sequence according to the present invention may be a promoter sequence, wherein the editing or mutation or modulation of the promoter comprises replacing the promoter, or promoter fragment with a different promoter (also referred to as replacement promoter) or promoter fragment (also referred to as replacement promoter fragment), wherein the promoter replacement results in any one of the following or any one combination of the following: an increased promoter activity, an increased promoter tissue specificity, a decreased promoter activity, a decreased promoter tissue specificity, a new promoter activity, an inducible promoter activity, an extended window of gene expression, a modification of the timing or developmental progress of gene expression in the same cell layer or other cell layer, for example, extending the timing of gene expression in the tapetum of anthers, a mutation of DNA binding elements and/or a deletion or addition of DNA binding elements. The promoter (or promoter fragment) to be modified can be a promoter (or promoter fragment) that is endogenous, heterologous, artificial, pre-existing, or transgenic to the cell that is being edited. The replacement promoter or fragment thereof can be a promoter or fragment thereof that is endogenous, heterologous, artificial, pre-existing, or transgenic to the cell that is being edited. Any other regulatory sequence according to the present disclosure may be modified as detailed for a promoter or promoter fragment above.

[0129] In a preferred embodiment and in case of plant genomes to be modified, it is highly desirable that the modification as mediated by the methods of the present invention does not result in a genetically modified, transgenic organism by integrating foreign DNA into the parent genome in an imprecise way, as environmental, regulatory and political issues have to be concerned. Therefore, the embodiments according to the present invention providing methods for modifying a genetic material of interest in a cellular system in a transient way are particularly suitable for providing a cellular system comprising a modification at a predetermined location without inserting foreign DNA and thus without providing a cell or organism regarded as genetically modified organism, as all tools necessary to perform the methods of the present invention can be provided to the cellular system in a transient way in active form.

[0130] In certain embodiments, it may be suitable to introduce a sequence encoding the at least one site-specific nuclease as knock-in, and/or to provide a (partial) inactivation of the sequence encoding the Pol theta, and/or to provide a (partial) inactivation of the at least one further NHEJ pathway repair enzyme in a donor genome or genetic material to be modified in a stable way to provide a genetic background assisting in performing the methods of the present invention. In these embodiments, it can be favorable to restore the integrity of the donor genome after a modification has been performed according to the methods of the present invention so that the stable mutation and/or knock-in and/or knock-out introduced before GE is then again restored by crossing and/or selection or other suitable technical means of molecular biology, cell culture, or haploidization.

[0131] As the methods of the present invention comprise the introduction of more than one biomolecule and/or the additional (partial) inactivation of at least one Pol theta enzyme and of at least one further NHEJ pathway enzyme, the methods may be performed in a fully transient way. In other embodiments, the methods may be performed by a combination of stable and transient approaches. In yet a further embodiment, the methods may also be performed by stably introducing suitable delivery tools to a cell or cellular system of interest.

[0132] In a further embodiment according to the various aspects of the present invention, a further modification at a predetermined location is introduced resulting in the introduction of a selection marker into the genetic material of the cellular system.

[0133] Edited plants can be easily identified and separated from non-edited plants, when they are co-edited with selectable markers. Based on specific resistance or visual markers, screenings can be performed. Any endogenous gene which could be modified in a convenient way which confers either a resistance or a phenotypic marker (e.g. shape, color, fluorescence etc.) could be used. Phenotypic examples might be e.g. glossy genes, golden, zebra7/lemonwhite1, tiedyed, nitrate reductase family members (for corn and sugar beet) and the like (see e.g. the disclosure of U.S. 62/502,418 which is incorporated by reference in its entirety).

[0134] Non-limiting examples of resistance and or phenotypic marker include herbicide resistance/tolerance, wherein the herbicide resistance/tolerance is selected from the group consisting of resistance/tolerance to EPSPS-inhibitors, including glyphosate, resistance/tolerance to glutamine synthesis inhibitors, including glufosinate, resistance/tolerance to ALS- or AHAS-inhibitors, including imidazoline or sulfonylurea, resistance/tolerance to ACCase inhibitors, including aryloxyphenoxypropionate (FOP), resistance/tolerance to carotenoid biosynthesis inhibitors, including inhibitors of carotenoid biosynthesis at the phytoene desaturase step, inhibitors of 4-hydroxyphenyl-pyruvate-dioxygenase (HPPD), or inhibitors of other carotenoid biosynthesis targets, resistance/tolerance to cellulose inhibitors, resistance/tolerance to lipid synthesis inhibitors, resistance/tolerance to long-chain fatty acid inhibitors, resistance/tolerance to microtubule assembly inhibitors, resistance/tolerance to photosystem I electron diverters, resistance/tolerance to photosystem II inhibitors, including carbamate, triazines and triazinones, resistance/tolerance to PPO-inhibitors and resistance/tolerance to synthetic auxins, including dicamba (2,4-D, i.e., 2,4-dichlorophenoxyacetic acid).

[0135] In one embodiment according to the various aspects of the present invention, the at least one nucleic acid sequence of interest to be introduced into a cellular system may be selected from the group consisting of: a transgene, a cisgene, a modified endogenous gene, a synthetic sequence, an intronic sequence, a coding sequence or a regulatory sequence.

[0136] In still another embodiment according to the various aspects of the present invention, the at least one nucleic acid sequence of interest to be introduced into a cellular system at a predetermined location may be a transgene, or part of a transgene, or a cisgene, or part of a cisgene, of an organism of interest, wherein the transgene, the cisgene or part thereof is selected from the group consisting of a gene encoding tolerance to abiotic stress, including drought stress, osmotic stress, heat stress, chilling stress, cold stress including frost, oxidative stress, heavy metal stress, nitrogen deficiency, phosphate deficiency, salt stress or waterlogging, herbicide resistance, including resistance to glyphosate, glufosinate/phosphinotricin, hygromycin, protoporphyrinogen oxidase (PPO) inhibitors, ALS inhibitors, and Dicamba, a gene encoding resistance or tolerance to biotic stress, including a viral resistance gene, a fungal resistance gene, a bacterial resistance gene, an insect resistance gene, or a gene encoding a yield related trait, including lodging resistance, bolting resistance, flowering time, shattering resistance, seed color, endosperm composition, or nutritional content.

[0137] In one embodiment according to the various aspects of the present invention, the at least one nucleic acid sequence of interest to be introduced into a cellular system at a predetermined location may be at least part of a modified endogenous gene of an organism of interest, wherein the modified endogenous gene comprises at least one deletion, insertion and/or substitution of at least one nucleotide in comparison to the nucleic acid sequence of the unmodified (wild-type) endogenous gene.

[0138] In another embodiment according to the various aspects of the present invention, the at least one nucleic acid sequence of interest to be introduced into a cellular system at a predetermined location may be at least part of a modified endogenous gene of an organism of interest, wherein the modified endogenous gene comprises at least one of a truncation, duplication, substitution and/or deletion of at least one nucleic acid position encoding a domain of the modified endogenous gene.

[0139] In yet another embodiment according to the various aspects of the present invention, the at least one nucleic acid sequence of interest to be introduced into a cellular system at a predetermined location may be at least part of a regulatory sequence, wherein the regulatory sequence comprises at least one of a core promoter sequence, a proximal promoter sequence, a cis acting element, a trans acting element, a locus control sequences, an insulator sequence, a silencer sequence, an enhancer sequence, a terminator sequence, a conserved motif of a regulatory element like TATA box and/or any combination thereof.

[0140] One embodiment of the above methods according to the present invention is a method for modifying a eukaryotic cell, preferably at least one plant cell, or a cellular system comprising the genetic material, or part of the genetic material thereof, in a targeted way to provide a genetically modified, preferably non-transgenic plant, wherein the method may inter alia be a method for trait development. For example, a highly site-specific substitution of 1, 2, 3 or more nucleotides in the coding sequence of a plant gene can be introduced so as to produce substitutions of one or more amino acids that will confer tolerance to at least one herbicide such as glyphosate, glufosinate, Dicamba or an acetolactate synthase (ALS) inhibiting herbicide. Furthermore, in another embodiment, substitutions of one or more amino acids in the coding sequence of a nucleotide binding site-leucine-rich repeat (NBS-LRR) plant gene that will alter the pathogen recognition spectrum of the protein to optimize the plant's disease resistance. In yet a further embodiment, a small enhancer sequence or transcription factor binding site can be modified in an endogenous promoter of a plant gene or can be introduced into the promoter of a plant gene so as to alter the expression profile or strength of the plant gene regulated by the promoter. The expression profile can be altered through various modifications, introductions or deletions in other regions, such as introns, 3′ untranslated regions, cis- or trans-enhancer sequences. In yet a further embodiment, the genome of a plant cell, preferably a meristematic plant cell, can be modified in a way so that the plant resulting from the modified meristematic cell, can produce a chemical substance or compound of agronomic or pharmaceutical interest, for example insulin or insulin analoga, antibodies, a protein with an enzymatic function of interest, or any other pharmaceutically relevant compound suitable as medicament, as dietary supplement, or as health care product.

[0141] Non limiting examples of traits that can be introduced by the method according to this embodiment are resistance or tolerance to insect pests, such as to rootworms, stem borers, cutworms, beetles, aphids, leafhoppers, weevils, mites and stinkbugs. These could be made by modification of plant genes, for example, to increase the inherent resistance of a plant to insect pests or to reduce its attractiveness to said pests. Other traits can be resistance or tolerance to nematodes, bacterial, fungal or viral pathogens or their vectors. Still other traits could be more efficient nutrient use, such as enhanced nitrogen use, improvements or introductions of efficiency in nitrogen fixation, enhanced photosynthetic efficiency, such as conversion of C3 plants to C4. Yet other traits could be enhanced tolerance to abiotic stressors such as temperature, water supply, salinity, pH, tolerance for extremes in sunlight exposure. Additional traits can be characteristics related to taste, appearance, nutrient or vitamin profiles of edible or feedable portions of the plant, or can be related to the storage longevity or quality of these portions. Finally, traits can be related to agronomic qualities such resistance to lodging, shattering, flowering time, ripening, emergence, harvesting, plant structure, vigor, size, yield, and other characteristics.

[0142] In one embodiment according to the various aspects of the present invention, the at least one site-specific nuclease may comprise a zinc-finger nuclease, a transcription activator-like effector nuclease, a CRISPR/Cas system, including a CRISPR/Cas9 system, a CRISPR/Cpf1 system, a CRISPR/CasX system, a CRISPR/CasY system, an engineered homing endonuclease, and a meganuclease, and/or any combination, variant, or catalytically active fragment thereof.

[0143] A CRISPR system in its natural environment describes a molecular complex comprising at least one small and individual non-coding RNA in combination with a Cas nuclease or another CRISPR nuclease like a Cpf1 nuclease (Zetsche et al., 2015, supra) which can produce a specific DNA double-stranded break. Presently, CRISPR systems are categorized into 2 classes comprising five types of CRISPR systems, the type II system, for instance, using Cas9 as effector and the type V system using Cpf1 as effector molecule (Makarova et al., Nature Rev. Microbiol., 2015). In artificial CRISPR systems, a synthetic non-coding RNA and a CRISPR nuclease and/or optionally a modified CRISPR nuclease, modified to act as nickase or lacking any nuclease function, can be used in combination with at least one synthetic or artificial guide RNA or gRNA combining the function of a crRNA and/or a tracrRNA (Makarova et al., 2015, supra). The immune response mediated by CRISPR/Cas in natural systems requires CRISPR-RNA (crRNA), wherein the maturation of this guiding RNA, which controls the specific activation of the CRISPR nuclease, varies significantly between the various CRISPR systems which have been characterized so far. Firstly, the invading DNA, also known as a spacer, is integrated between two adjacent repeat regions at the proximal end of the CRISPR locus. Type II CRISPR systems, for example, can code for a Cas9 nuclease as key enzyme for the interference step, which system contains both a crRNA and also a trans-activating RNA (tracrRNA) as the guide motif. These hybridize and form double-stranded (ds) RNA regions which are recognized by RNAseIII and can be cleaved in order to form mature crRNAs. These then in turn associate with the Cas molecule in order to direct the nuclease specifically to the target nucleic acid region. Recombinant gRNA molecules can comprise both the variable DNA recognition region and also the Cas interaction region and thus can be specifically designed, independently of the specific target nucleic acid and the desired Cas nuclease. As a further safety mechanism, PAMs (protospacer adjacent motifs) must be present in the target nucleic acid region; these are DNA sequences which follow on directly from the Cas9/RNA complex-recognized DNA. The PAM sequence for the Cas9 from Streptococcus pyogenes has been described to be “NGG” or “NAG” (Standard IUPAC nucleotide code) (Jinek et al, “A programmable dual-RNA-guided DNA endonuclease in adaptive bacterial immunity”, Science 2012, 337: 816-821). The PAM sequence for Cas9 from Staphylococcus aureus is “NNGRRT” or “NNGRR(N)”. Further variant CRISPR/Cas9 systems are known. Thus, a Neisseria meningitidis Cas9 cleaves at the PAM sequence NNNNGATT. A Streptococcus thermophilus Cas9 cleaves at the PAM sequence NNAGAAW. Recently, a further PAM motif NNNNRYAC has been described for a CRISPR system of Campylobacter (WO 2016/021973 A1). For Cpf1 nucleases it has been described that the Cpf1-crRNA complex, without a tracrRNA, efficiently recognize and cleave target DNA proceeded by a short T-rich PAM in contrast to the commonly G-rich PAMs recognized by Cas9 systems (Zetsche et al., supra). Furthermore, by using modified CRISPR polypeptides, specific single-stranded breaks can be obtained. The combined use of Cas nickases with various recombinant gRNAs can also induce highly specific DNA double-stranded breaks by means of double DNA nicking. By using two gRNAs, moreover, the specificity of the DNA binding and thus the DNA cleavage can be optimized. Further CRISPR effectors like CasX and CasY effectors originally described for bacteria, are meanwhile available and represent further effectors, which can be used for genome engineering purposes (Burstein et al., “New CRISPR-Cas systems from uncultivated microbes”, Nature, 2017, 542, 237-241).

[0144] Presently, for example, Type II systems relying on Cas9, or a variant or any chimeric form thereof, as endonuclease have been modified for genome engineering. Synthetic CRISPR systems consisting of two components, a guide RNA (gRNA) also called single guide RNA (sgRNA) and a non-specific CRISPR-associated endonuclease can be used to generate knock-out cells or animals by co-expressing a gRNA specific to the gene to be targeted and capable of association with the endonuclease Cas9. Notably, the gRNA is an artificial molecule comprising one domain interacting with the Cas or any other CRISPR effector protein or a variant or catalytically active fragment thereof and another domain interacting with the target nucleic acid of interest and thus representing a synthetic fusion of crRNA and tracrRNA (as “single guide RNA” (sgRNA) or simply “gRNA”). The genomic target can be any ˜20 nucleotide DNA sequence, provided that the target is present immediately upstream of a PAM sequence. The PAM sequence is of outstanding importance for target binding and the exact sequence is dependent upon the species of Cas9 and, for example, reads 5′ NGG 3′ or 5′ NAG 3′ (Standard IUPAC nucleotide code) (Jinek et al., Science 2012, supra) for a Streptococcus pyogenes derived Cas9. The PAM sequence for Cas9 from Staphylococcus aureus is NNGRRT or NNGRR(N). Many further variant CRISPR/Cas9 systems are known, including inter alia, Neisseria meningitidis Cas9 cleaving the PAM sequence NNNNGATT. A Streptococcus thermophilus Cas9 cleaving the PAM sequence NNAGAAW. Using modified Cas nucleases, targeted single-strand breaks can be introduced into a target sequence of interest. By the combined use of such a Cas nickase with different recombinant gRNAs highly site specific DNA double-strand breaks can be introduced using a double nicking system. Using one or more gRNAs can further increase the overall specificity and reduce off-target effects.

[0145] Once expressed, the Cas9 protein and the gRNA form a ribonucleoprotein complex through interactions between the gRNA “scaffold” domain and surface-exposed positively-charged grooves on Cas9. Cas9 undergoes a conformational change upon gRNA binding that shifts the molecule from an inactive, non-DNA binding conformation, into an active DNA-binding conformation. Importantly, the “spacer” sequence of the gRNA remains free to interact with target DNA. The Cas9-gRNA complex will bind any genomic sequence with a PAM, but the extent to which the gRNA spacer matches the target DNA determines whether Cas9 will cut. Once the Cas9-gRNA complex binds a putative DNA target, a “seed” sequence at the 3′ end of the gRNA targeting sequence begins to anneal to the target DNA. If the seed and target DNA sequences match, the gRNA will continue to anneal to the target DNA in a 3′ to 5′ direction (relative to the polarity of the gRNA).

[0146] CRISPR/Cas, e.g. CRISPR/Cas9, and likewise CRISPR/Cpf1 or CRISPR/CasX or CRISPR/CasY and other CRISPR systems are highly specific when gRNAs are designed correctly, but especially specificity is still a major concern, particularly for clinical uses or targeted plant GE based on the CRISPR technology. The specificity of the CRISPR system is determined in large part by how specific the gRNA targeting sequence is for the genomic target compared to the rest of the genome. Therefore, the methods according to the present invention when combined with the use of at least one CRISPR nuclease as site-specific nuclease and further combined with the use of a suitable CRISPR nucleic acid can provide a significantly more predictable outcome of GE. Whereas the CRISPR complex can mediate a highly precise cut of a genome or genetic material of a cell or cellular system at a specific site, the methods presented herein provide an additional control mechanism guaranteeing a programmable and predictable repair mechanism.

[0147] According to the various embodiments of the present invention, the above disclosure with respect to covalent and non-covalent association or attachment also applies for CRISPR nucleic acids sequences, which may comprise more than one portion, for example, a crRNA and a tracrRNA portion, which may be associated with each other as detailed above. In one embodiment, a RT nucleic acid sequence of the present invention may be placed within a CRISPR nucleic acid sequence of interest to form a hybrid nucleic acid sequence according to the present invention, which hybrid may be formed by covalent and non-covalent association.

[0148] In yet a further embodiment according to the various aspects of the present invention, the one or more nucleic acid sequence(s) flanking the at least one nucleic acid sequence of interest at the predetermined location may have at least 85%-100% complementary to the one or more nucleic acid sequence(s) adjacent to the predetermined location, upstream and/or downstream from the predetermined location, over the entire length of the respective adjacent region(s). Notably, a lower degree of homology or complementarity of the at least one flanking region may be used, e.g. at least 70%, at least 75%, at least 80%, at least 81%, at least 82%, at least 83%, or at least 84% homology/complementarity to at least one adjacent region in the genetic material of interest. For high precision GE relying on HDR template, i.e., a RT as disclosed herein, more than 95% homology/complementarity are favorable to achieve a highly targeted repair event. As shown in Rubnitz et al., Mol. Cell Biol., 1984, 4(11), 2253-2258, also very low sequence homology might suffice to obtain a homologous recombination. As it is known to the skilled person, the degree of complementarity will depend on the genetic material to be modified, the nature of the planned edit, the complexity and size of a genome, the number of potential off-target sites, the genetic background and the environment within a cell or cellular system to be modified.

[0149] In yet a further embodiment according to the various aspects of the present invention, the genetic material of the cellular system may be selected from the group consisting of a protoplast, a viral genome transferred in a recombinant host cell, a eukaryotic or prokaryotic cell, tissue, or organ, and a eukaryotic or prokaryotic organism, preferably a eukaryotic organism. Even though prokaryotic organism may not themselves comprise Pol theta or other enzymes of a NHEJ pathway, a prokaryotic genome, or parts thereof, may still represent a genetic material according to the present invention, for example, in case all or part of a prokaryotic genome is transferred into a eukaryotic host cell as cellular system, i.e., a prokaryotic donor genome may be modified in the context of a eukaryotic host molecular system.

[0150] In one embodiment according to the various aspects of the present invention, the genetic material of the cellular system may be selected from a eukaryotic cell, wherein the eukaryotic cell is preferably a plant cell.

[0151] In certain embodiments, the methods of the present invention can thus be suitable for use in a method of treatment a disease, wherein the disease is characterized by at least one genomic mutation and the artificial molecular complex is configured to target and repair the at least one genomic mutation resulting in a disease phenotype. There is thus provided a method of treating a disease using the artificial molecular complex according to any one of the preceding claims, wherein the disease is characterized by at least one genomic mutation and the artificial molecular complex is configured to target and repair the at least one genomic mutation. The therapeutic method of treatment may comprise gene or genome editing, or gene therapy.

[0152] In certain embodiments, the genetic material to be modified from at least one eukaryotic cell may be a meristematic plant cell, and the plant cell, after (partial) inactivation of Pol theta and at least one further repair enzyme of a NHEJ pathway and introduction of GE tools according to the present invention is further cultivated under suitable conditions until the developmental stage of maturity of the inflorescence is achieved to obtain a plant or plant material comprising a modification of interest mediated by the at least one molecular complex according to the present invention. Several protocols are, for example, available to the skilled person for producing germinable and viable pollen from in vitro cultured maize tassels, for example in Pareddy D R et al. (1992) Maturation of maize pollen in vitro. Plant Cell Rep 11 (10):535-539. doi:10.1007/BF00236273, Stapleton A E et al. (1992) Immature maize spikelets develop and produce pollen in culture. Plant. Cell Rep., 11 (5-6):248-252, or Pareddy D R et al. (1989) Production of normal, germinable and viable pollen from in vitro-cultured maize tassels, Theor. Appl. Genet. 77 (4):521-526. Those protocols are inter alia based on excision of the tassel, surface sterilization and culture in a media with kinetin to promote tassel growth and maturation. After the spikelets are formed, a continuous harvest of anthers can be performed. After extrusion, anthers will be desiccated until the pollen comes out. Alternatively, anthers can be dissected and the pollen is shed in liquid medium that is subsequently used to pollinate ears.

[0153] “Maturity of the inflorescence” as used herein refers to the state, when the immature inflorescence of a plant comprising at least one meristematic cell has reached a developmental stage, when a mature inflorescence, i.e. a staminate inflorescence (male) or a pistillate inflorescence (female), is achieved and thus a gamete of the pollen (male) or of the ovule (female) or both is present. Said stage of the reproductive phase of a plant is especially important, as obtained plant material can directly be used for pollination of a further plant or for fertilization with the pollen of another plant.

[0154] By generating cells or cellular systems that harbor a mutation in Pol θ together with a mutation in an enzyme essential for NHEJ, for example, Ku70, Ku80, or Ligase IV (LigIV) and other targets disclosed herein, it is possible to produce cells or cellular systems having complete dominance of the HDR pathway with no random (or untargeted) integration of foreign DNA. Performing gene targeting experiments in said cells or cellular systems, and particularly in plant cells or cellular systems, harboring the double mutations has several benefits. First, by inhibiting the NHEJ pathway, this prevents SSN-induced DSBs from being repaired by this pathway so they remain open and available for HDR. Second, by inhibiting Pol theta, there is no random integration of the RT or any of the transgene cassettes (e.g., SSN cassette, fluorescent reporters, plasmid backbone, etc.) to interfere with the screening of cell lines or organisms for gene targeting. The present invention provides methods particularly suitable for plant GE and taking into consideration the complexity of plant genomes to avoid a significant loss of viability of these at least double mutant or double impaired cells with respect to the NHEJ enzymes to provide cellular systems comprising a (partially) inactivated Pol theta and at least one further enzyme having an increased HDR rate when GE is performed. Therefore, the methods disclosed herein provide an ideal environment for gene targeting, in which the dominant mechanism available to repair DSBs is by HDR.

[0155] Another strategy and preferred embodiments described herein are the transient (partial) inhibition of Pol theta and the NHEJ pathway in cells or cellular systems, while simultaneously delivering an SSN and RT. This can be done with interfering RNA directed against Pol theta and either Ku70, Ku80, ligase IV, or another essential NHEJ enzyme as disclosed herein.

[0156] By protein interference with these enzymes such as, for example, by delivering adenovirus 4 E1B55K and E4orf6 proteins which inhibit ligase IV; by delivering small chemical inhibitors of these enzymes such as, for example, SCR7, W7, Vanillin, NU7026, NU7441 (Arras & Fraser, 2016, PLOS ONE 11(9): e0163049) which inhibits ligase IV, DNA PKcs, Ku cofactor synthesis; or by any combination of these and the mutation methods. Other chemical or synthetic, and/or biological inhibitors of any enzyme of a NHEJ pathway disclosed herein may be used which inhibitor can be administered to a cell or cellular system in a dose non-toxic to the cell or cellular system to guarantee viability of the cell or cellular system, wherein the dose is sufficient to at least partially inhibit the activity of Pol theta and at least one further enzyme of a NHEJ pathway, preferably in a transient way.

[0157] As it is known to the skilled person and as defined above, RNAi relies on the action of small RNAs, which may be selected from a micro RNA (miRNA), a small interfering RNA (siRNA), or a Piwi-interacting RNA (piRNA), comprising naturally and/or non-naturally occurring (synthetic) ribonucleotides, wherein synthetic nucleotide, e.g. comprising a phosphorothioate backbone, might be suitable to enhance stability of the usually easily degradable RNA molecule. SiRNAs of ˜21 nt have been reported to play a crucial role in RNA silencing, a term referring to post-transcriptional gene silencing in plants, quelling in fungi and RNAi animals. The mechanism of siRNA biogenesis and function are thought to be highly conserved in almost all the eukaryotes including plants and animals, in which siRNAs are produced from double-stranded RNA (dsRNA) by an RNase III termed Dicer in animal cells or DCL (Dicer-like) in plants, and then incorporated into a RNA-induced silencing complex (RISC), in which siRNAs play a guiding role in sequence-specific cleavage of target mRNAs. Moreover, in some organisms, such as Caenorhabditis elegans, Drosophila and plants, the siRNA signal is found to spread along the mRNA target, which results in the production of secondary siRNAs and the induction of transitive RNA silencing (see Lu et al., Nucleic. Acids Res., 2004, 32(21):e171).

[0158] In other embodiments, an RNA interference (RNAi) mechanism may thus be used to achieve a transient inhibition of activity of at least one Pol theta and at least one further NHEJ enzyme. The interfering RNA can trigger silencing of the mRNAs for relevant effector enzymes of at least one NHEJ pathway. It can be delivered as double-stranded RNA, as single-stranded antisense RNA, in hairpin DNA expression cassettes, or as chimeric poly-sgRNA/siRNA sequences which generate multiple sgRNA-Cas9 RNP complexes upon the Dicer-mediated digestion of the siRNA parts, leading to more efficient disruption of the target gene in cells (Ha J. S. et al., Journal of Controlled Release 250 (2017) 27-35).

[0159] The (partial) transient inhibition according to the various embodiments disclosed herein can inhibit or inactivate a Pol theta and at least one further NHEJ enzyme in a different degree, for example, the activity of a Pol theta enzyme may be fully inactivated, whereas the activity of at least one further NHEJ pathway enzyme may be partially inactivated and vice versa.

[0160] According to the various aspects and embodiments of the present invention, it is contemplated that a transient (partial) inactivation can comprise a combination of at least one of a RNAi silencing mechanism acting on the RNA level, and/or a chemical/synthetic or biological inhibitor acting on the RNA or protein level of an enzyme to be inactivated, and/or an inhibitor acting, for example, in trans to regulate transcription of a Pol theta and at least one further NHEJ pathway enzyme.

[0161] In a further embodiment according to the various aspects of the present invention, there is provided a method, wherein the eukaryotic organism may be a plant, or a part of a plant. In yet a further embodiment according to the various aspects of the present invention, the part of the plant may be selected from the group consisting of leaves, stems, roots, emerged radicles, flowers, flower parts, petals, fruits, pollen, pollen tubes, anther filaments, ovules, embryo sacs, egg cells, ovaries, zygotes, embryos, zygotic embryos, somatic embryos, apical meristems, vascular bundles, pericycles, seeds, roots, and cuttings.

[0162] In one embodiment according to the various aspects of the present invention, the genetic material of the cellular system may be, or may originate from, a plant species selected from the group consisting of: Hordeum vulgare, Hordeum bulbusom, Sorghum bicolor, Saccharum officinarium, Zea mays, Setaria italica, Oryza minuta, Oriza sativa, Oryza australiensis, Oryza alta, Triticum aestivum, Secale cereale, Malus domestica, Brachypodium distachyon, Hordeum marinum, Aegilops tauschii, Daucus glochidiatus, Beta vulgaris, Daucus pusillus, Daucus muricatus, Daucus carota, Eucalyptus grandis, Nicotiana sylvestris, Nicotiana tomentosiformis, Nicotiana tabacum, Solanum lycopersicum, Solanum tuberosum, Coffea canephora, Vitis vinifera, Erythrante guttata, Genlisea aurea, Cucumis sativus, Morus notabilis, Arabidopsis arenosa, Arabidopsis lyrata, Arabidopsis thaliana, Crucihimalaya himalaica, Crucihimalaya wallichii, Cardamine flexuosa, Lepidium virginicum, Capsella bursa pastoris, Olmarabidopsis pumila, Arabis hirsute, Brassica napus, Brassica oeleracia, Brassica rapa, Raphanus sativus, Brassica juncea, Brassica nigra, Eruca vesicaria subsp. sativa, Citrus sinensis, Jatropha curcas, Populus trichocarpa, Medicago truncatula, Cicer yamashitae, Cicer bijugum, Cicer arietinum, Cicer reticulatum, Cicer judaicum, Cajanus cajanifolius, Cajanus scarabaeoides, Phaseolus vulgaris, Glycine max, Astragalus sinicus, Lotus japonicas, Torenia fournieri, Allium cepa, Allium fistulosum, Allium sativum, and Allium tuberosum. Based on the disclosure provided herein, the methods of the present invention can easily be transferred and can be used for the modification of the genetic material obtained from other plants or plant species.

[0163] In a further aspect, there is provided a method for producing a cellular system, preferably a cellular system as defined herein above, comprising the following steps: (a) providing a cellular system or a genetic material of a cellular system comprising a functional Polymerase theta enzyme, or the sequence encoding the same, and one or more further functional DNA repair enzyme(s), or the sequence(s) encoding the same, of the NHEJ pathway; (b) inactivating or partially inactivating the Polymerase theta enzyme, or the sequence encoding the same, and inactivating or partially inactivating one or more further DNA repair enzyme(s), or the sequence(s) encoding the same, wherein the inactivation or partial inactivation takes place simultaneously or subsequently, preferably in a transient manner; (c) optionally, introducing the genetic material into a cellular system, (d) obtaining a cellular system comprising a functionally inactivated or partially inactivated Polymerase theta enzyme and one or more further functionally inactivated or partially inactivated DNA repair enzyme(s). This aspect may be particularly suitable to provide a cellular system and/or a genetic material to be further modified by any method of GE to provide a cell or system having an at least impaired endogenous NHEJ pathway, at least for a transient period of time, for example, to test for optimum GE conditions.

[0164] In one embodiment, the inactivation or partial inactivation may be a stable inactivation, or the inactivation or partial inactivation may be a transient inactivation, preferably a transient inactivation or partial inactivation based on a gene silencing machinery, including RNAi, or a chemical inhibitor, or any combination thereof. Preferably all alleles of the Polymerase theta enzyme and/or the one or more further DNA repair enzyme(s) of a NHEJ pathway are inactivated or partially inactivated, i.e. a knock-out of the Polymerase theta enzyme and/or the one or more further DNA repair enzyme(s) of a NHEJ pathway is present homozygously.

[0165] In a further embodiment according to the various aspects disclosed herein, the modification or inactivation or partial inactivation may comprise a modification of at least one nucleic acid sequence encoding the Polymerase theta enzyme and of at least one nucleic acid sequence encoding one or more further DNA repair enzyme(s) of a NHEJ pathway, wherein the at least one modification may comprise at least one deletion, insertion or substitution of at least one nucleotide in the respective encoding nucleic acid sequence resulting in the alteration of the corresponding amino acid sequence in the encoded enzymes.

[0166] In a further embodiment according to the various aspects disclosed herein, the Polymerase theta enzyme and the one or more further DNA repair enzyme of the NHEJ pathway are inactivated or partially inactivated by a gene silencing/inactivation machinery. The embodiment using a gene silencing/inactivation machinery will usually rely on a RNAi machinery and may be particularly suitable for a transient (partial) inactivation to guarantee that the Pol theta and the one or more further DNA repair enzyme of the NHEJ pathway can easily be reactivated to fulfill its natural function in DSB break repair after a targeted GE event has been introduced.

[0167] The at least one Polymerase theta enzyme and the one or more further DNA repair enzyme of the NHEJ pathway to be inactivated or partially inactivated according to the aspects disclosed herein directed to at least one cellular system may be selected from the sequences as defined herein above.

[0168] In certain embodiments, the gene silencing/inactivation machinery may selected from a system comprising (i) at least one small interfering RNA, selected from a DNA hairpin cassette, or interfering RNA, wherein the interfering RNA may comprise a double-stranded RNA, optionally comprising a hairpin structure, or a single-stranded sense and/or antisense RNA; optionally comprising (ii) a site specific RNA endonuclease, such as C2c2; and optionally comprising (iii) at least one of an adenovirus 4 E1B55K and/or E4orf6 protein, or the sequence encoding the same; and/or optionally comprising (iv) at least one small chemical inhibitor selected from the group consisting of: SCR7, W7, Vanillin, NU7026 and NU7441.

[0169] In one embodiment relying on RNAi as transient (partial) inactivation mechanism, first, uniqueness of a RNA inhibitory molecule sequence of interest used as silencer in a genome or genetic material of interest is confirmed. Then sequences about 100 to about 1.000 bp, preferably about 250 to about 500 bp, from the 3′UTR of an mRNA of interest encoding an enzyme to be inhibited are designed. These sequences may be used to be integrated into a hairpin vector or a hairpin construct, or to be used as sense and antisense sequences, to down-regulate expression of a gene on RNA level precisely.

### Delivery Methods:

[0170] A variety of suitable transient and stable delivery techniques suitable according to the methods of the present invention for introducing genetic material, biomolecules, including any kind of single-stranded and double-stranded DNA and/or RNA, or amino acids, synthetic or chemical substances, into a eukaryotic cell, preferably a plant cell, or into a cellular system comprising genetic material of interest, are known to the skilled person, and comprise inter alia choosing direct delivery techniques ranging from polyethylene glycol (PEG) treatment of protoplasts (Potrykus et al. 1985), procedures like electroporation (D'Halluin et al., 1992), microinjection (Neuhaus et al., 1987), silicon carbide fiber whisker technology (Kaeppler et al., 1992), viral vector mediated approaches (Gelvin, Nature Biotechnology 23, “Viral-mediated plant transformation gets a boost”, 684-685 (2005)) and particle bombardment (see e.g. Sood et al., 2011, Biologia Plantarum, 55, 1-15). Transient transfection of mammalian cells with PEI is disclosed in Longo et al., Methods Enzymol., 2013, 529:227-240. Protocols for transformation of mammalian cells are disclosed in Methods in Molecular Biology, Nucleic Acids or Proteins, ed. John M. Walker, Springer Protocols.

[0171] For plant cells to be modified, despite transformation methods based on biological approaches, like Agrobacterium transformation or viral vector mediated plant transformation, and methods based on physical delivery methods, like particle bombardment or microinjection, have evolved as prominent techniques for introducing genetic material into a plant cell or tissue of interest. Helenius et al. (“Gene delivery into intact plants using the Helios™ Gene Gun”, Plant Molecular Biology Reporter, 2000, 18 (3):287-288) discloses a particle bombardment as physical method for introducing material into a plant cell. Currently, there thus exists a variety of plant transformation methods to introduce genetic material in the form of a genetic construct into a plant cell of interest, comprising biological and physical means known to the skilled person on the field of plant biotechnology and which can be applied to introduce at least one gene encoding at least one wall-associated kinase into at least one cell of at least one of a plant cell, tissue, organ, or whole plant. Notably, said delivery methods for transformation and transfection can be applied to introduce the tools of the present invention simultaneously. A common biological means is transformation with Agrobacterium spp. which has been used for decades for a variety of different plant materials. Viral vector mediated plant transformation represents a further strategy for introducing genetic material into a cell of interest. Physical means finding application in plant biology are particle bombardment, also named biolistic transfection or microparticle-mediated gene transfer, which refers to a physical delivery method for transferring a coated microparticle or nanoparticle comprising a nucleic acid or a genetic construct of interest into a target cell or tissue. Physical introduction means are suitable to introduce nucleic acids, i.e., RNA and/or DNA, and proteins. Likewise, specific transformation or transfection methods exist for specifically introducing a nucleic acid or an amino acid construct of interest into a plant cell, including electroporation, microinjection, nanoparticles, and cell-penetrating peptides (CPPs). Furthermore, chemical-based transfection methods exist to introduce genetic constructs and/or nucleic acids and/or proteins, comprising inter alia transfection with calcium phosphate, transfection using liposomes, e.g., cationic liposomes, or transfection with cationic polymers, including DEAD-dextran or polyethylenimine, or combinations thereof. Said delivery methods and delivery vehicles or cargos thus inherently differ from delivery tools as used for other eukaryotic cells, including animal and mammalian cells and every delivery method has to be specifically fine-tuned and optimized so that a construct of interest for introducing and/or modifying at least one gene encoding at least one wall-associated kinase in the at least one plant cell, tissue, organ, or whole plant; and/or can be introduced into a specific compartment of a target cell or cellular system of interest in a fully functional and active way. The above delivery techniques, alone or in combination, can be used for in vivo (including in planta) or in vitro approaches. In particular for embodiments relying on the transient introduction strategies, RNA-based silencing molecules or chemical, synthetic, or biological inhibitors of at least one of a Pol theta and/or a further enzyme of a NHEJ pathway can, for example, be introduced together with, before, or subsequently to the transformation and/or transfection of relevant tools for GE.

[0172] Depending on the nature of the molecule introduced, e.g., a rather stable vector in comparison to a rather unstable RNA molecule, different time schemes of transformation/transfection should be chosen to guarantee that the (partial) inactivation of Pol theta and at least one further NHEJ pathway enzyme is available exactly at the time point when the GE tools are available or provided to one and the same cell. RNAi-based down-regulation of a target may thus need some time to become active. Likewise, in case a molecule is introduced as transcribable/translatable (plasmid) vector, it may take some time until the tools can be provided in their active form and are available in the right compartment within a cell or cellular system of interest. To be able to provide highly active molecules to a cellular system of interest, in certain embodiments it may thus be preferred to provide pre-assembled and function molecular complexes comprising at least one site-specific nuclease, optionally at least one gRNA (for CRISPR nucleases), and further providing a nucleic acid sequence of interest, preferably flanked by at least one homology region in the form of a repair template, to be able to provide a fully functional GE complex to a cell or cellular system exactly synchronized with (partial) inactivation of Pol theta and at least one further NHEJ pathway enzyme.

[0173] In particular with respect to embodiments directed to the provision of methods for providing a modified genetic material of a plant cell, or for providing a whole plant comprising modified genetic material, transient methods may be preferable due to legal and regulatory concerns.

[0174] In one aspect according to the present invention, there is thus provided a plant cell, tissue, organ, whole plant or plant material, or a derivative or a progeny thereof, obtainable by a method as disclosed herein, wherein the methods optionally comprise a further step of breeding or crossing.

[0175] The present invention is further described with reference to the following non-limiting examples.

### EXAMPLES

### Example 1: Generation of Double Mutants in Arabidopsis thaliana

[0176] To test whether double mutants of Pol θ (PolQ) and at least one mutant from the group of Ku70, Ku80 or LigIV are viable and could be used for further studies, the following Arabidopsis T-DNA insertion mutant lines were commercially obtained: NASC-IDs N698253, N667884, N656936, N677892 and N656431 (see Table 1 below).

TABLE 1
Overview of the tested mutant lines

| | | Line | | |
|---|---|---|---|---|
| Gene notation | AGI-ID | notation | T-DNA | NASC-ID |
| Pol θ, TEB | At4g32700 | teb-2 | SALK_035610C | N698253 |
| | | teb-5 | SALK_018851C | N667884 |
| KU70 | At1g16970 | ku70 | SALK_123114C | N656936 |
| KU80 | At1g48050 | ku80 | SALK_112921C | N677892 |
| LIGIV | At5g57160 | ligIV | SALK_044027C | N656431 |

[0177] T-DNA insertion and expression of disrupted genes were determined by PCR/qRT-PCR (FIG. 1). Next, all mutant lines were grown until flowering, and the two PolQ (At4g32700) mutants (teb-2 and teb-5) were each crossed with the Ku70 (At1g16970), Ku80 (At1g48050) or LigIV (At5g57160) mutants to obtain the respective double mutants. Importantly, all crossings resulted in viable seeds which were harvested and propagated to F2. F2 plants were characterized by PCR for T-DNA insertion into both alleles of PolQ, Ku70, Ku80 and LigIV, respectively. For 5 of the 6 crossings, plants with T-DNA insertions into both alleles of both genes were identified. For the teb-2×ku70 crossing, no homozygous double mutants were identified (Table 2). The obtained rates were significantly lower than expected, indicating that especially the Ku-double mutants have some fertility problems. All double mutants showed no severe growth phenotypes, even though some plants showed reduced growth. F3 seeds were harvested from these plants (Table 3). None of the identified double mutants showed severe fertility defects. It was thus possible to obtain enough seeds for all double mutants for subsequent floral dip experiments.

TABLE 2
Overview of F3 generations obtained from double mutant lines.

| Double mutant lines | Generation |
|---|---|
| teb-2 × ligIV | F3 |
| teb-5 × ligIV | F3 |
| teb-5 × ku70 | F3 |
| teb-2 × ku70 | No homozygous plant |
| teb-2 × ku80 | F3 |
| teb-2 × ku80 | F3 |

### Example 2: Generation of Gene Targeting Construct for Testing Gene Targeting Frequencies

[0178] For determination of gene targeting fequencies, a construct based on the gene targeting construct “pFF15”, described by Shiml, Fauser and Puchta (2014), was designed targeting the ADH1 (alcohol dehydrogenase 1) locus (FIG. 2A; SEQ ID NO: 82). The construct contains a Bar selection marker to allow easy determination of transformation efficiency in wild type Col-0 plants, and to test for random integration in the double mutants. To be able to efficiently screen gene targeting events, a GFP expression cassette under control of the seed specific 2S promoter (Bensmihen et al., FEBS Letters 561 1-3 (2004): Analysis of an activated ABI5 allele using a new selection method for transgenic Arabidopsis seeds) was inserted into the repair template. The insertion of the repair template into the ADH-1 locus in the Arabidopsis genome results in green fluorescent seeds, which can then easily be identified by fluorescence microscopy.

### Example 3: Stable Transformation of T-DNA by Agrobacteria to Assess Frequency of Random Integration in the Double Mutant Background

[0179] To analyze random integration frequency in the double mutants and the Pol θ single mutants, stable transformation of the gene targeting construct by floral dip Agrobacteria transformation was performed. Since Pol θ mutation was reported to abolish random T-DNA integration into the target genome (van Kregten, M. et al. Nat. Plants 2, 16164 (2016)), it is not possible to determine the rate of transformation by BASTA selection in Pol θ mutant plants. Thus, in order to monitor transformation efficiency wildtype plants were also transformed for each experiment. BASTA selection was then applied to determine transformation efficiency (FIG. 3). Furthermore, a BASTA selection was also done for aliquots of the transformed mutants. The obtained data clearly showed that none of the mutants led to BASTA resistant plants, demonstrating that the random integration of the T-DNA targeting construct was successfully inhibited in single and double Pol θ mutants (FIG. 3).

### Example 4: Agrobacterium tumefaciens Transformation to Assess Gene Targeting Frequency in the Double Mutant Background

[0180] To test the gene targeting frequency single and double mutants were transformed with the above described gene targeting construct. First, polQ single mutants were transformed with the gene targeting constructs, following the Arabidopsis floral dip protocol described in Clough et al. (Clough, S. J. and Bent, A. F. (1998) Floral dip: a simplified method for Agrobacterium-mediated transformation of Arabidopsis thaliana. Plant J, 16(6), 735-743). In parallel, wildtype Col-0 plants were transformed to confirm high transformation efficiency. After floral dip transformation, plants were grown for approximately 3 weeks. Then watering was stopped to promote seed maturation and mature seeds were harvested. An aliquot of the seeds was used for BASTA selection, and no BASTA resistant plants were identified in both the teb-2 and the teb-5 polQ mutant plants. In the wildtype plants, a transformation efficiency of ˜1% was confirmed. The results indicate that random integration of T-DNA in the polQ mutant plants is efficiently inhibited.

[0181] The remaining transformed polQ mutant seeds were then screened for green fluorescent seeds. After three rounds of transformation, only two green fluorescent seeds were indentified, representing an average gene targeting rate of 0.4 HDR events per 100.000 seeds (Table 3). Molecular characterization of these seeds confirmed integration of the repair template into the gene targeting locus of the adh1 gene (FIG. 4).

[0182] In the next step, double mutants were transformed with the gene targeting constructs, also following the Arabidopsis floral dip protocol of Clough and Bent (1998). After floral dip transformation, plants were grown for another ˜3 weeks and then watering was stopped to promote seed maturation. Mature seeds were harvested and screened for green fluorescent seeds (Table 3). After three independent transformation experiments, in summary 31 fluorescent seeds were identified in the teb-5×ligIV double mutant, representing an average gene targeting rate rate of 2.9 HDR events per 100.000 seeds (Table 3). Similar results were obtained in the equivalent teb-2×ligIV double mutant, where 13 fluorescent seeds were identified, representing an gene targeting rate of 5.6 HDR events per 100.000 seeds.

[0183] The gene targeting rate was also determined in the teb-5×ku70 double mutants. There rounds of transformation experiments were performed as described above. In total, 19 fluorescent seeds were identified in the teb-5×ku70 double mutant, representing an average gene targeting rate of 1.9 HDR events per 100.000 seeds (Table 3).

[0184] The obtained data indicate a relative increase in the gene targeting rate in both the polQ-ligIV and polQ-ku70 double mutants compared to the polQ single mutants.

TABLE 3
Summary of transformation experiments, number of total seeds,
fluorescent seeds and the transformation efficiency.

| Floral dip | | No. of | Agrobact. | Number of | Fluorescent | HDR Rate | Transformation | |
|---|---|---|---|---|---|---|---|---|
| exp. No. | Genotype | plants | strain | seeds | seeds | (/100.000) | efficiency | |
| #10 | Col-0 | 48 | AGL1 | 407100 | >>105 | | ~0.8% | (BASTA) |
| | teb-2 | 48 | | 419500 | 0 | 0 | 0% | (BASTA) |
| | teb-5 | 48 | | 447400 | 0 | 0 | 0% | (BASTA) |
| #11 | Col-0 | 48 | GV3101 | 408200 | >>67 | | ~0.5% | (BASTA) |
| | teb-2 | 48 | | 282300 | 0 | 0 | 0% | (BASTA) |
| | teb-5 | 48 | | 315100 | 1 | 0.32 | 0% | (BASTA) |
| #15 | Col-0 | 48 | GV3101 | 269100 | >>6 | | | |
| | teb-2 | 48 | | 257300 | 1 | 0.39 | | |
| | teb-5 | 48 | | 419200 | 0 | 0 | | |
| | teb-5 × ligIV | 48 | | 175600 | 0 | 0 | | |
| | teb-5 × ku70 | 48 | | 113200 | 0 | 0 | | |
| #17 | Col-0 | 108 | GV3101 | 410200 | >>51 | | | |
| | teb-2 × ligIV | 108 | | 233100 | 13 | 5.58 | | |
| | teb-5 × ligIV | 108 | | 200200 | 18 | 8.99 | | |
| | teb-5 × ku70 | 108 | | 233100 | 15 | 6.43 | | |
| #18 | Col-0 | 96 | GV3101 | 913000 | >>13 | | | |
| | teb-5 × ligIV | 96 | | 687400 | 13 | 1.89 | | |
| | teb-5 × ku70 | 96 | | 677700 | 4 | 0.59 | | |

[0185] Overall, the herein presented data thus clearly in show dicate that double mutants in Pol θ and Ku70, Ku80 or LigIV result in increased homologous recombination, while the random integration of T-DNA into the plant genome is efficiently inhibited. The herein described methods of the invention therefore provide means to introduce site-specific edits or modifications in a highly precise manner without inserting unwanted mutations or edits into a genome of interest as random/non-predictable integration during repair of an artificially induced double strand break is efficiently inhibited.

### Example 5: Generation of Double Mutants in Arabidposis Thaliana (Arabidopsis)

[0186] In addition to the above experiments, further plant models can be provided. To this end, suitable clones are SALK_018851.41.00.x SALK T-DNA homozygous knockout line for At4g32695, SALK_035610.46.30.x SALK T-DNA homozygous knockout line for At4g32700, for KU70: At1g16970; Col-0: SALK_123114 (Heacock et al., 2007), for KU80: At1g48050; Col-0: SAIL_714_A04; Ws: FLAG_396 B06, and for LIG4: At5g57160; Col-0: SALK_044027 (Atlig4-2); Col-0: SAIL_597_D10 (Atlig4-5) (Waterworth et al., 2010), respectively. Crosses can be performed in both direction, with mutant X (Pol θ) as father and mutant Y (Ku70, Ku80 or LigIV) as mother, or vice versa. Crossed plants could then be selfed to fix the mutations in both genes. Progeny of the crosses are then analyzed by specific PCR screening systems for T-DNA integration in both mutated genes, optionally followed by selfing steps. The resulting homozygous double mutants Pol θ//KU70, Pol θ//KU80 and Pol θ//LigIV can be used for all further experiments in Arabidopsis.

[0187] During plant growth for described crossing experiments plants and their phenotypes are assessed for potential negative growth impacts.

[0188] Further insertion mutant information can be obtained from the SIGnAL website at http://signal.salk.edu. Relevant genetic material suitable for the crosses can be obtained from the SALK T-DNA collection (Alonso, J. M. et al. Genome-wide insertional mutagenesis of Arabidopsis, 2003).

### Example 6: Stable Transformation of T-DNA by Agrobacteria to Assess Frequency of Random Integration in the Double Mutant Background

[0189] To further analyze random integration frequency in the double mutants, stable transformation of T-DNA by Agrobacteria transformation is performed. Briefly, Agrobacterium tumefaciens has been transformed with a binary vector containing a nptII resistance gene followed by transformation of Arabidopsis plant material. Any other, or an additional marker, including hygromycin (hyg), sulfadizine or basta, for example, may be used. Arabidopsis plants is then grown to flowering stage at 24° C. day/20° C. night, with 250 μmol photon m⁻² s⁻¹. These plants correspond to the homozygous double mutant lines in Example 1, or non-mutant siblings as controls. To obtain more floral buds per plant, inflorescences can be clipped after most plants have formed primary bolts, relieving apical dominance and encouraging synchronized emergence of multiple secondary bolts. Next, plants are infiltrated or dipped when most secondary inflorescences were about 1-10 cm tall (4-8 days after clipping).

### Example 7: Agrobacterium tumefaciens (Agrobacterium) Transformation

[0190] For Agrobacterium transformations, standard protocols, slightly modified in accordance with Clough et al., 1998, The Plant Journal, can be used for the culture of Agrobacterium and the subsequent inoculation of plants. Briefly, Agrobacterium tumefaciens strain AGL1 is used in all experiments. Bacteria are grown to stationary phase in liquid culture at 28° C., 250 r.p.m. in sterilized LB (10 g tryptone, 5 g yeast extract, 5 g NaCl per litre water). Cells are harvested by centrifugation for 20 min at room temperature at about 5,500 g and then resuspended in infiltration medium to a final OD600 of approximately 0.80 prior to use. A revised floral dip inoculation medium may contain 5.0% sucrose and 0.04% Silwet L-77. For floral dip approaches, the inoculum is added to a beaker, plants are dipped into this suspension in an inverted way such that all above-ground tissues are submerged, and plants are then removed after 2-3 min and the procedure is repeated twice. Such dipped plants are removed from the beaker, placed in a plastic tray and covered with a tall clear-plastic dome to maintain humidity. Plants are left in a dark location overnight at 16-18° C. and returned to the light the next day. Plants are grown for a further 3-5 weeks until siliques are brown and dry. Finally, seeds are harvested for further analysis and experiments.

[0191] For transient approaches, i.e., when Agrobacterium is used to insert a traditional hairpin DNA construct to be transcribed into a hairpin RNA having RNA silencing capacity, the same Agrobacterium transformation steps as detailed above may be used.

[0192] In case that it is intended to transfect a RNAi mediating small RNA directly into a cell, e.g. a (partially) double-stranded RNA, single-stranded sense and/or antisense RNA, a chimeric or synthetic RNA, and/or a chimeric poly-sgRNAgRNA/siRNA to generate a ribo-nucleo particle with a CRISPR nuclease, a direct delivery of the RNA effector, optionally provided in a complex with a site-specific nuclease, e.g., by transfection methods, may be used.

[0193] Harvested seeds are, for example, put on hygromycin selection medium. As it is known in the technical field, any other suitable marker, comprising inter alia antibiotic resistance and/or fluorescent markers, may be used, for example Basta or GFP, optionally under the control of tissue-specific and/or inducible or constitutive promoter, e.g. a seed specific 2S promoter (Bensmihen et al., 2014). Notably, fewer or even 0 (zero) transgenic plants would be identified in the transformed double mutants Pol θ//KU70, Pol θ//KU80 or Pol θ//LigIV, respectively. In WT transformation we observed a transformation frequency of about 0.5% after selection. All experiments should be repeated 5 times to ascertain that there is fewer or even no negative selection impact.

### Example 8: Increased Homologous Recombination in Double Mutants (One Circular Vector)

[0194] For further testing increased homologous recombination frequency a construct carrying the bar/hyg gene (including a suitable promoter and terminator), flanked by suitable homology regions to the genome (ADH1 locus) may be used. In principle, any target region, gene of interest or even a nucleic acid to be altered of interest, in the genome of a cell of interest may be used. Here the exemplary target locus is the ADH1 locus. Instead of the hyg marker, another selection marker, also including a reporter gene, may be used.

[0195] In addition, the vector contains a CRISPR nuclease, including inter alia a Cas or Cpf, CasX or CasY, encoding sequence as effector nuclease and a corresponding sgRNA or crRNA aligning with a region in the target ADH1 locus. WT plants (controls) and double mutants (Pol θ//KU70, Pol θ//KU80, and Pol θ//LigIV, respectively) are transformed by floral dip transformation as described above. T1 seedlings are selected on allyl alcohol and additionally analyzed for stable integration of the bar/hyg gene (or any suitable marker) by qPCR or by other inspections methods depending on the marker gene chosen.

[0196] A preferred homologous recombination test may be a fluorescent reporter knock-in to cruciferin such as reported by Shaked et al., 2005, (see, for example, http://www.pnas.org/content/102/34/12265) because the results can be directly measured in the T1 seed. Similar assays with a RFP gene knock-in to a different seed storage gene may be used to obtain optimum marker brightness.

[0197] T1 may further analyzed to check if the T-DNA of the binary has been integrated. Depending on whether conventional HR using Agrobacterium in a normal (NHEJ active) environment, or precision HR, as disclosed herein, is used either the full-T-DNA, or only certain regions, or only the nucleic acid sequence of interest will be integrated.

[0198] To check if a HR-based repair has occurred, plants can be easily analyzed by PCR and amplicon sequencing based on the available sequence information to demonstrate the improved rate of HR in the identified events in comparison to transformed WT plants. Any increase of HR rate in combination with no random integration will be suitable.

### Example 9: Increased Homologous Recombination in Double Mutants (Two Circular Vectors)

[0199] In addition to the above described experiments, increased homologous recombination frequency can be tested by using a construct carrying the bar/hyg gene (including promoter and terminator), flanked by suitable homology regions to the genome (ADH1 locus). In principle, any target region, gene of interest or even a nucleic acid to be altered of interest, in the genome of a cell of interest may be used. Here the exemplary target locus is the ADH1 locus. Instead of the hyg marker, another selection marker, also including a reporter gene, may be used.

[0200] In addition, a second vector encoding a Cas or Cpf effector, or any other CRISPR nuclease, as site-specific nuclease and a sgRNA/crRNA aligning with a region in the target ADH1 locus may be used.

[0201] WT plants (controls) and double mutants (for example, Pol θ//KU70, Pol θ//KU80, or Pol θ//LigIV, respectively) may be transformed by floral dip transformation as described above. Alternatively, other transformation strategies may be used.

[0202] T1 seedlings may be selected on allyl alcohol and additionally analyzed for stable integration of the bar/hyg gene by qPCR. Additionally, T1 can be further analyzed to check if the T-DNA of the binary has been integrated. As a result, it might be found that in none of the selected plants a successful integration of the T-DNA can be detected. To check if a real HR event has occurred, plants can be analyzed by PCR and amplicon sequencing. To check if a HR-based repair has occurred, plants can be easily analyzed by PCR and amplicon sequencing based on the available sequence information to demonstrate the improved rate of HR in the identified events in comparison to transformed WT plants. Any increase of HR rate in combination with no random integration event detected will be suitable.

### Example 10: Increased Homologous Recombination in Protoplasts of Double Mutants (One Circular Vector)

[0203] For further testing the effect of the double mutants in different plant material and to demonstrate a broad applicability, increased homologous recombination frequency can be tested using a construct carrying the bar/hyg gene (including suitable promoter and terminator structures), flanked by suitable homology regions to the genome (ADH1 locus) may be used. In principle, any target region, gene of interest or even a nucleic acid to be altered of interest, in the genome of a cell of interest may be used. Here the exemplary target locus is the ADH1 locus. Instead of the hyg marker, another selection marker, also including a reporter gene, may be used.

[0204] In addition, a vector containing a CRISPR nuclease and at least one suitable sgRNA or crRNA aligning with a region in the target ADH1 locus is provided. WT protoplasts (controls) and double mutant protoplasts (for example, Pol θ//KU70; Pol θ//KU80, or Pol θ//LigIV, respectively) can be isolated and transformed by polyethylene glycol (PEG) transformation following standard protocols (see, e.g., Methods in Molecular Biology, vol. 82, Arabidopsis Protocols). Protoplasts are analyzed after 48 hr by PCR for stable integration of repair template and/or HR at designated target site. Additionally, HR can be confirmed by sequencing. The frequency is expected to be at least 3-fold higher than the results measured in the transformed WT protoplasts. Any increase of HR rate in combination with no random integration event detected will be suitable.

### Example 11: Increased Homologous Recombination in Protoplasts of Double Mutants (Two Circular Vectors)

[0205] For further testing increased homologous recombination frequency, again a construct carrying the bar/hyg gene (including a suitable promoter and terminator), flanked by suitable homology regions to the genome (ADH1 locus) may be used. In principle, any target region, gene of interest or even a nucleic acid to be altered of interest, in the genome of a cell of interest may be used. Here the exemplary target locus is the ADH1 locus. Instead of the hyg marker, another selection marker, also including a reporter gene, may be used. In addition, a second vector containing a CRISPR nuclease encoding sequence as effector nuclease and a corresponding sgRNA/crRNA also comprising a homology region towards the ADH1 locus may be used. Protoplasts of WT plants (controls) and different double mutants (for example, Pol θ//KU70; Pol θ//KU80, or Pol θ//LigIV, respectively) can then be isolated and transformed by PEG transformation following standard protocols. Protoplasts are analyzed after 48 hr by PCR for stable integration of repair template and/or HR at designated target site. Additionally, HR can be confirmed by sequencing. For this set-up in the protoplasts, the frequency is expected to be at least 3-fold higher than the results measured in the transformed WT protoplasts. Any increase of HR rate in combination with no random integration event detected will be suitable.

### Example 12: Increased Homologous Recombination in Protoplasts of Double Mutants (One Linearized Vector)

[0206] As a further experiment in the protoplast test series, increased homologous recombination frequency can be tested using a linearized vector. Again, a construct carrying the bar/hyg gene (including a suitable promoter and terminator), flanked by suitable homology regions to the genome (ADH1 locus) may be used. In principle, any target region, gene of interest or even a nucleic acid to be altered of interest, in the genome of a cell of interest may be used. Here the exemplary target locus is the ADH1 locus. Instead of the hyg marker, another selection marker, also including a reporter gene, may be used. In addition, a second vector containing a CRISPR nuclease of interest and sgRNA/crRNA as detailed above may be used. Both vectors can be linearized by a unique restriction enzyme, for example NotI, AscI, or another, preferably 8 base, cutter. Protoplasts of WT plants (controls) and double mutants (for example, Pol θ//KU70; Pol θ//KU80, or Pol θ//LigIV, respectively) may be isolated and transformed by PEG transformation as described above. Protoplasts were then analyzed after 48 hr by PCR for stable integration of repair template and/or HR at designated target site. Additionally, HR can be confirmed by sequencing. For this set-up, the frequency is expected to be at least 1.25 to 1.5-fold higher than the results measured in the transformed WT protoplasts. Any increase of HR rate in combination with no random integration event detected will be suitable.

### Example 13: Triple and Quadruple Mutants

[0207] Based on the material detailed in Example 1 above, triple and quadruple mutants may be constructed in the Arabidopsis background to expand the toolkit available for optimizing highly site-specific genome editing experiments in plant cells. By conventional crossing and breeding, for example, a Pol θ//KU70//KU80 (P78), Pol θ//KU80//LigIV (P8L), a Pol θ//KU70//LigIV (P7L), and a Pol θ//KU70//KU80//LigIV (P78L) mutant can thus be created.

[0208] Initial tests, again using both Agrobacterium and protoplast transformation/transfection using either one or more vectors, optionally linearized for protoplast transfections, of a bar/hyg construct together with a CRISPR nuclease as site-specific effector nuclease can then revealed that certain mutants, for example, P7L or P8L, or even more dominantly the P78L mutant might have even better results in enhancing the transformation efficiency during GE in comparison to the double mutants.

### Example 14: Transient Approach—RNAi

[0209] Transient plant transformation is becoming of increasing importance. For testing increased homologous recombination frequency in a transient set-up, again a construct carrying the bar/hyg gene (including a suitable promoter and terminator), flanked by suitable homology regions to the genome (ADH1 locus) may be used. In principle, any target region, gene of interest or even a nucleic acid to be altered of interest, in the genome of a cell of interest may be used. Here the exemplary target locus is the ADH1 locus. Instead of the hyg marker, another selection marker, also including a reporter gene, may be used. In addition, the vector can contain a CRISPR nuclease site-specific effector coding sequence and the cognate sgRNA/crRNA also against a region in the ADH1 locus as described above.

[0210] A second vector may be used carrying a traditional hairpin DNA expression cassette against Pol θ and KU70, or KU80, or LigIV, or any other combination as detailed for the double, triple and quadruple mutants detailed above. As an alternative, the interfering RNA can be delivered as double-stranded RNA, as single-stranded antisense RNA, or as chimeric poly-sgRNA/siRNA sequences which generate multiple sgRNA-CRISRPR nuclease RNP complexes upon the Dicer-mediated digestion of the siRNA parts, leading to more efficient disruption of the target gene in cells (Ha J. S. et al., Journal of Controlled Release 250 (2017) 27-35). HR can be analyzed by PCR and amplicon sequencing.

[0211] Notably, the transient down-regulation of Pol θ and a further player involved in NHEJ is of particular interest in the context of targeted GE, as there might be no interest in propagating a knock-out for Pol θ, KU70, KU80, and/or LigIV stably inherited to a progenitor cell, but it might rather be of interest to perform the down-regulation of Pol θ, KU70, KU80, and/or LigIV just before a targeted GE of a nucleic acid, a gene, or a locus of interest is performed to maintain the integrity of the endogenous NHEJ pathway in progeny cells and plants.

### Example 15: Transient Approach—Protein Interference

[0212] To further test whether increased homologous recombination frequency can be obtained in a transient knock-down system, again a construct carrying the bar/hyg gene (including a suitable promoter and terminator), flanked by suitable homology regions to the genome (ADH1 locus) may be used. In principle, any target region, gene of interest or even a nucleic acid to be altered of interest, in the genome of a cell of interest may be used. Here the exemplary target locus is the ADH1 locus. Instead of the hyg marker, another selection marker, also including a reporter gene, may be used. In addition, the vector can contain a CRISPR nuclease site-specific effector coding sequence and the cognate sgRNA/crRNA also against a region in the ADH1 locus as described above.

[0213] Protein interference with these enzymes can be induced by delivering of adenovirus 4 E1B55K and E4orf6 proteins according to SEQ ID NO: 79 and 81 which specifically inhibit LigIV by delivering small chemical inhibitors of these enzymes such as, for example, SCR7, W7, Vanillin, NU7026, NU7441 (PLOS ONE 11(9): e0163049) which inhibits LigIV, DNA protein kinases, Ku cofactor synthesis; or by any combination. Again, this attempt is particularly suitable for plant genome engineering, where a permanent knock-out of LigIV, KU70, KU80 and/or Pol θ might not be envisaged. HR efficiency and frequency can be analyzed by PCR and amplicon sequencing.

### Example 16: Using NHEJ Interference with GE in Zea mays

[0214] Zea mays (or corn, maize) represents a major crop plant worldwide. To transfer the findings of the above examples from the dicot model organism to the monocot maize as relevant crop plant for GE, the experiments done in Arabidopsis can also transferred to the maize model.

[0215] The Maize GDB was used to search by sequence for suitable mutant seed stocks. Iterative BLAST analyses were performed in parallel for the relevant genes of interest encoding maize LigIV, KU70, KU80 and/or Pol θ. The insertion of a MU transposon 70 bp upstream of the ATG in the 5′UTR was identified for maize gene GRMZM2G151944. Maize seeds can then be searched on http://teosinte.uoregon.edu/mu-illumina/ from the University of Oregon providing access to a subset of the Mu insertions detected by Mu-Illumine (see https://www.ncbi.nlm.nih.gov/pubmed/20409008) sequencing during mutant cloning efforts involving the Photosynthesis Mutant Library (see http://pml.uoregon.edu/photosyntheticml.html). The posted insertions map between 150 bp upstream of the annotated start codon and 150 bp downstream of the annotated stop codon of gene models in the Filtered Gene Set from Maize Genome Assembly AGPv3 (www.gramene.org). Insertions that map more distant to genes rarely disrupt gene expression; due to limited resources, so that these are not made available.

[0216] Due to homologies to a relevant rice DNA polymerase (Os12g19370.1), GRMZM2G151944 containing maize seeds can be suitable.

[0217] For KU70, a seed stock insertion site alignment for a known KU70 sequence showed an insertion at the very end of the KU70 gene of maize. The relevant seeds can be ordered at http://teosinte.uoregon.edu/mu-illumina/?maize=GRMZM2G414496#.

[0218] For KU80, stocks of uniform MU insertions in the KU80 gene were identified to be Mu1089096, 1043955, 1089097, 1058684 (https://www.maizegdb.org) and the respective seeds can be ordered.

[0219] For maize DNA ligase IV (LigIV) uniform MU insertion seed stocks are Mu1009698::Mu Stocks:uFMu-00167; Mu1089771::Mu stocks:uFMu-11366 and mu1044651::mu stocks:UFMu-05547.

[0220] First, the available single mutants can be checked for growth performance and impact of mutations on development. In parallel it can be tested, if the mutants are indeed mutated at the desired positions by PCR. To this end, a qPCR system can be established to suitably measure the transcription of the individual genes and the transcription was measured in cDNA

[0221] If mutants are confirmed mutants can be used for further experiments. Otherwise different strategies to generate the mutants are possible, like TILLING, GE, GE-base-editors, and the like.

[0222] The term “TILLING” or “Targeting Induced Local Lesions in Genomes” describes a well-known reverse genetics technique designed to detect unknown SNPs (single nucleotide polymorphisms) in genes of interest which is widely employed in plant and animal genomics. The technique allows for the high-throughput identification of an allelic series of mutants with a range of modified functions for a particular gene. TILLING combines mutagenesis (e.g., chemical or via UV-light) with a sensitive DNA screening-technique that identifies single base mutations.

[0223] Meanwhile, as it is known to the skilled person, TILLING has been extended to many plant species and becomes of paramount importance to reverse genetics in crops species. A major recent change to TILLING has been the application of next-generation sequencing (NGS) to the process, which permits multiplexing of gene targets and genomes.. Because it is readily applicable to most plants, it remains a dominant non-transgenic method for obtaining mutations in known genes and thus represents a readily available method for non-transgenic approaches according to the methods of the present invention. As it is known to the skilled person, TILLING usually comprises the chemical mutagenesis, e.g., using ethyl methanesulfonate (EMS), or UV light induced modification of a genome of interest, together with a sensitive DNA screening-technique that identifies single base mutations in a target gene.

[0224] Generally, analysis of increased HR by applying CRISPR nucleases and repair templates in maize may use different variants (single vector, multiple vector, circular, linear, etc.) for the different mutant combinations. T1 seedlings need to be analyzed for HR and for potential stable integration of the T-DNA.

[0225] Furthermore, nptII based selection and PMI based selection, or bar based selection may be used. In terms of loci for doing integration assays CDS fusion insertion into highly expressed genes like Alpha Tubulin (GRMZM2G152466), Aconitate hydratase (GRMZM2G020801), or HSP70 may be suitable for better selection.

1. A method for modifying the genetic material of a cellular system at a predetermined location with at least one nucleic acid sequence of interest, wherein the method comprises the following steps:
(a) providing a cellular system comprising a Polymerase theta enzyme, or a sequence encoding the same, and one or more further enzymes of a NHEJ pathway, or one or more sequences encoding the same;
(b) inactivating or partially inactivating the Polymerase theta enzyme, or the sequence encoding the same, and inactivating or partially inactivating one or more further DNA repair enzymes of a NHEJ pathway, or one or more sequences encoding the same;
(c) introducing into the cellular system
(i) the at least one nucleic acid sequence of interest, optionally flanked by one or more homology sequences complementary to one or more nucleic acid sequences adjacent to the predetermined location, and
(ii) at least one site-specific nuclease, or a sequence encoding the same, the site-specific nuclease inducing a double-strand break at the predetermined location;
(d) optionally: determining the presence of the modification at the predetermined location in the genetic material of the cellular system; and
(e) obtaining a cellular system comprising a modification at the predetermined location of the genetic material of the cellular system.

2. The method of claim 1, wherein the method comprises the additional step:
(f) restoring an activity of the inactivated or partially inactivated Polymerase theta enzyme and/or restoring an activity of the one or more further inactivated or partially inactivated DNA repair enzymes of a NHEJ pathway in the cellular system comprising a modification at the predetermined location, or in a progeny system thereof.

3. The method according to claim 1, wherein the Polymerase theta to be inactivated or partially inactivated comprises an amino acid sequence according to SEQ ID NO: 2, 7, 8, 9 or 10, or an amino acid sequence having at least 75%, 76%, 77%, 78%, 79%, 80%, 81%, 82%, 83%, 84%, 85%, 86%, 87%, 88%, 89%, 90%, 91%, 92%, 93%, 94%, 95%, 96%, 97%, 98%, or 99% sequence identity to the sequence set forth in SEQ ID NO: 2, 7, 8, 9 or 10, respectively; or is encoded by a nucleic acid sequence according to SEQ ID NO: 1, 3, 4, 5 or 6, or a nucleic acid having at least 75%, 76%, 77%, 78%, 79%, 80%, 81%, 82%, 83%, 84%, 85%, 86%, 87%, 88%, 89%, 90%, 91%, 92%, 93%, 94%, 95%, 96%, 97%, 98%, or 99% sequence identity to the sequence set forth in SEQ ID No: 1, 3, 4, 5 or 6, respectively.

4. The method according to claim 1, wherein the one or more further DNA repair enzymes of a NHEJ pathway to be inactivated or partially inactivated are independently selected from the group consisting of Ku70, Ku80, DNA-dependent protein kinase, Ataxia telangiectasia mutated (ATM), ATM—and Rad3—related (ATR), Artemis, XRCC4, DNA ligase IV and XLF, or any combination thereof.

5. The method according to claim 4, wherein at least two, at least three, or at least four further DNA repair enzymes of a NHEJ pathway are inactivated or partially inactivated, preferably wherein at least Ku70 and DNA ligase IV, or wherein at least Ku80 and DNA ligase IV are inactivated or partially inactivated.

6. The method according to claim 1, wherein the one or more further DNA repair enzymes of a NHEJ pathway to be inactivated or partially inactivated is Ku70, or a nucleic acid sequence encoding the same, wherein the Ku70 comprises an amino acid sequence according to SEQ ID NO: 12, 18, 19 or 20, or an amino acid sequence having at least 75%, 76%, 77%, 78%, 79%, 80%, 81%, 82%, 83%, 84%, 85%, 86%, 87%, 88%, 89%, 90%, 91%, 92%, 93%, 94%, 95%, 96%, 97%, 98%, or 99% sequence identity to the sequence set forth in SEQ ID NO: 12, 18, 19 or 20, respectively, or wherein the nucleic acid sequence encoding the same comprises a sequence according to SEQ ID NO: 11, 13, 14, 15, 16 or 17, or a nucleic acid sequence having at least 75%, 76%, 77%, 78%, 79%, 80%, 81%, 82%, 83%, 84%, 85%, 86%, 87%, 88%, 89%, 90%, 91%, 92%, 93%, 94%, 95%, 96%, 97%, 98%, or 99% sequence identity to the sequence set forth in SEQ ID NO: 11, 13, 14, 15, 16 or 17, respectively, and/or wherein the one or more further DNA repair enzymes of a NHEJ pathway to be inactivated or partially inactivated is Ku80, or a nucleic acid sequence encoding the same, wherein the Ku80 comprises an amino acid sequence according to SEQ ID NO: 22, 23, 24 or 29, or an amino acid sequence having at least 75%, 76%, 77%, 78%, 79%, 80%, 81%, 82%, 83%, 84%, 85%, 86%, 87%, 88%, 89%, 90%, 91%, 92%, 93%, 94%, 95%, 96%, 97%, 98%, or 99% sequence identity to the sequence set forth in SEQ ID NO: 22, 23, 24 or 29, respectively, or wherein the nucleic acid sequence encoding the same comprises a sequence according to SEQ ID NO: 21, 25, 26, 27 or 28, or a nucleic acid sequence having at least 75%, 76%, 77%, 78%, 79%, 80%, 81%, 82%, 83%, 84%, 85%, 86%, 87%, 88%, 89%, 90%, 91%, 92%, 93%, 94%, 95%, 96%, 97%, 98%, or 99% sequence identity to the sequence set forth in SEQ ID NO: 21, 25, 26, 27 or 28, respectively, and/or wherein the one or more further DNA repair enzymes of a NHEJ pathway to be inactivated or partially inactivated is DNA-dependent protein kinase, or a nucleic acid sequence encoding the same, wherein the DNA-dependent protein kinase comprises an amino acid sequence according to SEQ ID NO: 32, 33 or 35, or an amino acid sequence having at least 75%, 76%, 77%, 78%, 79%, 80%, 81%, 82%, 83%, 84%, 85%, 86%, 87%, 88%, 89%, 90%, 91%, 92%, 93%, 94%, 95%, 96%, 97%, 98%, or 99% sequence identity to the sequence set forth in SEQ ID NO: 32, 33 or 35, respectively, or wherein the nucleic acid sequence encoding the same comprises a sequence according to SEQ ID NO: 30, 31 or 34, or a nucleic acid sequence having at least 75%, 76%, 77%, 78%, 79%, 80%, 81%, 82%, 83%, 84%, 85%, 86%, 87%, 88%, 89%, 90%, 91%, 92%, 93%, 94%, 95%, 96%, 97%, 98%, or 99% sequence identity to the sequence set forth in SEQ ID NO: 30, 31 or 34, respectively, and/or wherein the one or more further DNA repair enzymes of a NHEJ pathway to be inactivated or partially inactivated is ATM, or a nucleic acid sequence encoding the same, wherein the ATM comprises an amino acid sequence according to SEQ ID NO: 37, 38, 39, 41, 42, 43, 44, 45, 46, 47 or 48, or an amino acid sequence having at least 75%, 76%, 77%, 78%, 79%, 80%, 81%, 82%, 83%, 84%, 85%, 86%, 87%, 88%, 89%, 90%, 91%, 92%, 93%, 94%, 95%, 96%, 97%, 98%, or 99% sequence identity to the sequence set forth in SEQ ID NO: 37, 38, 39, 41, 42, 43, 44, 45, 46, 47 or 48, respectively, or wherein the nucleic acid sequence encoding the same comprises a sequence according to SEQ ID NO: 36 or 40, or a nucleic acid sequence having at least 75%, 76%, 77%, 78%, 79%, 80%, 81%, 82%, 83%, 84%, 85%, 86%, 87%, 88%, 89%, 90%, 91%, 92%, 93%, 94%, 95%, 96%, 97%, 98%, or 99% sequence identity to the sequence set forth in SEQ ID NO: 36 or 40, respectively, and/or wherein the one or more further DNA repair enzymes of a NHEJ pathway to be inactivated or partially inactivated is ATM—and Rad3—related (ATR), or a nucleic acid sequence encoding the same, wherein the ATR comprises an amino acid sequence according to SEQ ID NO: 50, 51, 52, 53, 55 or 56, or an amino acid sequence having at least 75%, 76%, 77%, 78%, 79%, 80%, 81%, 82%, 83%, 84%, 85%, 86%, 87%, 88%, 89%, 90%, 91%, 92%, 93%, 94%, 95%, 96%, 97%, 98%, or 99% sequence identity to the sequence set forth in SEQ ID NO: 50, 51, 52, 53, 55 or 56, respectively, or wherein the nucleic acid sequence encoding the same comprises a sequence according to SEQ ID NO: 49 or 54, or a nucleic acid sequence having at least 75%, 76%, 77%, 78%, 79%, 80%, 81%, 82%, 83%, 84%, 85%, 86%, 87%, 88%, 89%, 90%, 91%, 92%, 93%, 94%, 95%, 96%, 97%, 98%, or 99% sequence identity to the sequence set forth in SEQ ID NO:49 or 54, respectively, and/or wherein the one or more further DNA repair enzymes of a NHEJ pathway to be inactivated or partially inactivated is Artemis, or a nucleic acid sequence encoding the same, wherein the Artemis comprises an amino acid sequence according to SEQ ID NO: 60, 61, 62 or 64, or an amino acid sequence having at least 75%, 76%, 77%, 78%, 79%, 80%, 81%, 82%, 83%, 84%, 85%, 86%, 87%, 88%, 89%, 90%, 91%, 92%, 93%, 94%, 95%, 96%, 97%, 98%, or 99% sequence identity to the sequence set forth in SEQ ID NO: 60, 61, 62 or 64, respectively, or wherein the nucleic acid sequence encoding the same comprises a sequence according to SEQ ID NO: 57, 58, 59 or 63, or a nucleic acid sequence having at least 75%, 76%, 77%, 78%, 79%, 80%, 81%, 82%, 83%, 84%, 85%, 86%, 87%, 88%, 89%, 90%, 91%, 92%, 93%, 94%, 95%, 96%, 97%, 98%, or 99% sequence identity to the sequence set forth in SEQ ID NO: 57, 58, 59 or 63, respectively, and/or wherein the one or more further DNA repair enzymes of a NHEJ pathway to be inactivated or partially inactivated is XRCC4, or a nucleic acid sequence encoding the same, wherein the XRCC4 comprises an amino acid sequence according to SEQ ID NO: 66, 67 or 69, or an amino acid sequence having at least 75%, 76%, 77%, 78%, 79%, 80%, 81%, 82%, 83%, 84%, 85%, 86%, 87%, 88%, 89%, 90%, 91%, 92%, 93%, 94%, 95%, 96%, 97%, 98%, or 99% sequence identity to the sequence set forth in SEQ ID NO: 66, 67 or 69, respectively, or wherein the nucleic acid sequence encoding the same comprises a sequence according to SEQ ID NO: 65 or 68, or a nucleic acid sequence having at least 75%, 76%, 77%, 78%, 79%, 80%, 81%, 82%, 83%, 84%, 85%, 86%, 87%, 88%, 89%, 90%, 91%, 92%, 93%, 94%, 95%, 96%, 97%, 98%, or 99% sequence identity to the sequence set forth in SEQ ID NO: 65 or 68, respectively, and/or wherein the one or more further DNA repair enzymes of a NHEJ pathway to be inactivated or partially inactivated is DNA ligase IV, or a nucleic acid sequence encoding the same, wherein the DNA ligase IV comprises an amino acid sequence according to SEQ ID NO: 71, 72, 76 or 77, or an amino acid sequence having at least 75%, 76%, 77%, 78%, 79%, 80%, 81%, 82%, 83%, 84%, 85%, 86%, 87%, 88%, 89%, 90%, 91%, 92%, 93%, 94%, 95%, 96%, 97%, 98%, or 99% sequence identity to the sequence set forth in SEQ ID NO: 71, 72, 76 or 77, respectively, or wherein the nucleic acid sequence encoding the same comprises a sequence according to SEQ ID NO: 70, 73, 74 or 75 or a nucleic acid sequence having at least 75%, 76%, 77%, 78%, 79%, 80%, 81%, 82%, 83%, 84%, 85%, 86%, 87%, 88%, 89%, 90%, 91%, 92%, 93%, 94%, 95%, 96%, 97%, 98%, or 99% sequence identity to the sequence set forth in SEQ ID NO: 70, 73, 74 or 75, respectively, and/or wherein the one or more further DNA repair enzymes of a NHEJ pathway to be inactivated or partially inactivated is XLF, or a nucleic acid sequence encoding the same.

7. The method according to claim 1, wherein the at least one nucleic acid sequence of interest is provided as part of at least one vector, or as at least one linear molecule.

8. The method according to claim 7, wherein the at least one vector is introduced into the cellular system by biological or physical means, including transfection, transformation, including transformation by Agrobacterium spp., preferably by Agrobacterium tumefaciens, a viral vector, biolistic bombardment, transfection using chemical agents, including polyethylene glycol transfection, or any combination thereof.

9. The method according to claim 1, wherein the at least one site-specific nuclease, or the sequence encoding the same, is introduced into the cellular system by biological or physical means, including transfection, transformation, including transformation by Agrobacterium spp., preferably by Agrobacterium tumefaciens, a viral vector, bombardment, transfection using chemical agents, including polyethylene glycol transfection, or any combination thereof.

10. The method according to claim 1, wherein the at least one site-specific nuclease or a catalytically active fragment thereof, is introduced into the cellular system as a nucleic acid sequence encoding the site-specific nuclease or the catalytically active fragment thereof, wherein the nucleic acid sequence is part of at least one vector, or wherein the at least one site-specific nuclease or the catalytically active fragment thereof, is introduced into the cellular system as at least one amino acid sequence.

11. The method according to claim 1, wherein the at least one nucleic acid sequence of interest to be introduced into a cellular system is selected from the group consisting of: a transgene, a modified endogenous gene, a synthetic sequence, an intronic sequence, a coding sequence or a regulatory sequence.

12. The method according to claim 1, wherein the at least one nucleic acid sequence of interest to be introduced into a cellular system is a transgene, wherein the transgene comprises a nucleic acid sequence encoding a gene of a genome of an organism of interest, or at least a part of said gene.

13. The method according to claim 1, wherein the at least one nucleic acid sequence of interest to be introduced into a cellular system at a predetermined location is a transgene of an organism of interest, wherein the transgene or part of the transgene is selected from the group consisting of a gene encoding resistance or tolerance to abiotic stress, including drought stress, osmotic stress, heat stress, cold stress, oxidative stress, heavy metal stress, nitrogen deficiency, phosphate deficiency, salt stress or waterlogging, herbicide resistance, including resistance to glyphosate, glufosinate/phosphinotricin, hygromycin, protoporphyrinogen oxidase (PPO) inhibitors, ALS inhibitors, and Dicamba, a gene encoding resistance or tolerance to biotic stress, including a viral resistance gene, a fungal resistance gene, a bacterial resistance gene, an insect resistance gene, or a gene encoding a yield related trait, including lodging resistance, flowering time, shattering resistance, seed color, endosperm composition, or nutritional content.

14. The method according to claim 1, wherein the at least one nucleic acid sequence of interest to be introduced into a cellular system at a predetermined location is at least part of a modified endogenous gene of an organism of interest, wherein the modified endogenous gene comprises at least one deletion, insertion and/or substitution of at least one nucleotide in comparison to the nucleic acid sequence of the unmodified endogenous gene.

15. The method according to claim 1, wherein the at least one nucleic acid sequence of interest to be introduced into a cellular system at a predetermined location is at least part of a modified endogenous gene of an organism of interest, wherein the modified endogenous gene comprises at least one of a truncation, duplication, substitution and/or deletion of at least one nucleic acid position encoding a domain of the modified endogenous gene.

16. The method according to claim 1, wherein the at least one nucleic acid sequence of interest to be introduced into a cellular system at a predetermined location is at least part of a regulatory sequence, wherein the regulatory sequence comprises at least one of a core promoter sequence, a proximal promoter sequence, a cis regulatory sequence, a trans regulatory sequence, a locus control sequences, an insulator sequence, a silencer sequence, an enhancer sequence, a terminator sequence, and/or any combination thereof.

17. The method according to claim 1, wherein the at least one site-specific nuclease comprises a zinc-finger nuclease, a transcription activator-like effector nuclease, a CRISPR/Cas system, including a CRISPR/Cas9 system, a CRISPR/Cpf1 system, a CRISPR/CasX system, a CRISPR/CasY system, an engineered homing endonuclease, and a meganuclease, and/or any combination, variant, or catalytically active fragment thereof

18. The method according to claim 1. wherein the one or more nucleic acid sequences flanking the at least one nucleic acid sequence of interest at the predetermined location is/are at least 85%-100% complementary to the one or more nucleic acid sequences) sequences adjacent to the predetermined location, upstream and/or downstream from the predetermined location, over the entire length of a respective adjacent region.

19. The method according to claim 1, wherein the genetic material of the cellular system is selected from the group consisting of a protoplast, a viral genome transferred in a recombinant host cell, a eukaryotic or prokaryotic cell, tissue, or organ, and a eukaryotic or prokaryotic organism.

20. The method according to claim 19, wherein the eukaryotic cell is a plant cell, or an animal cell.

21. The method according to claim 19, wherein the eukaryotic organism is a plant, or a part of a plant.

22. The method according to claim 21, wherein the part of the plant is selected from the group consisting of leaves, stems, roots, emerged radicles, flowers, flower parts, petals, fruits, pollen, pollen tubes, anther filaments, ovules, embryo sacs, egg cells, ovaries, zygotes, embryos, zygotic embryos, somatic embryos, apical meristems, vascular bundles, pericycles, seeds, roots, and cuttings.

23. The method according to claim 1, wherein the genetic material of the cellular system is, or originates from, a plant species selected from the group consisting of: Hordeum vulgare, Hordeum bulbusom, Sorghum bicolor, Saccharum officinarium, Zea mays, Setaria italica, Oryza minula, Oriza sativa, Oryza australiensis, Oryza alta, Triticum aestivtun, Secale cereale, Malus domestica, Brachypodium distachyon, Hordeum marinum, Aegilops tauschii, Danciis glochidialus, Beta vulgaris, Daucus pusillus, Daucus muricatus, Daucus carota, Eucalyptus grandis, Nicotiana sylvestris, Nicotiana tomentosiformis, Nicotiana tabacum, Solatium lycopersicum, Solanum tuberosum, Coffea canephora, Vitis vinifera, Erythrante guttata, Genlisea aurea, Cucumis sativus, Morus notabilis, Arabidopsis arenosa, Arabidopsis lyrata, Arabidopsis thaliana, Crucihimalaya himalaica, Crucihimalaya wallichii, Cardamine flexuosa, Lepidium virginicum, Capsella bursa pastoris, Olmarabidopsis pumila, Arabis hirsute, Brassica napus, Brassica oeleracia, Brassica rapa, Raphanus sativus, Brassica juncea, Brassica nigra, Eruca vesicaria subsp. saliva. Citrus sinensis, Jatropha curcas, Populus trichocarpa, Medicago truncatula, Cicer yamashitae, Cicer bijugum, Cicer arietinum, Cicer reticulatum, Cicer judaicum, Cajanus cajanifolius, Cajanus scarabaeoides, Phaseolus vulgaris. Glycine max. Astragalus sinicus, Lotus japonicas, Torenia fournieri, Allium cepa, Allium fistulosum, Allium sativum, and Album tuberosum.

24. A cellular system obtained by the method according to claim 1.

25. A cellular system comprising an inactivated or partially inactivated Polymerase theta (Pol theta) enzyme and one or more further inactivated or partially inactivated DNA repair enzymes of a NHEJ pathway,
wherein the modified cellular system is selected from the group consisting of one or more plant cells, a plant, and parts of a plant.

26. The cellular system according to claim 25, wherein the one or more parts of the plant are selected from the group consisting of leaves, stems, roots, emerged radicles, flowers, flower parts, petals, fruits, pollen, pollen tubes, anther filaments, ovules, embryo sacs, egg cells, ovaries, zygotes, embryos, zygotic embryos, somatic embryos, apical meristems, vascular bundles, pericycles, seeds, roots, and cuttings.

27. The cellular system according to claim 25, wherein the one or more plant cells, the plant or the parts of a plant originate From a plant species selected from the group consisting of: Hordeum vulgare, Hordeum bulbusom, Sorghum bicolor, Saccharum officinarium, Zea mays, Setaria italica, Oryza minuta, Oriza sativa, Oryza auslraliensis, Oryza alata, Triticum aestivum, Secale cereale, Malus domestica, Brachypodium distachyon, Hordeum marinum, Aegilops lauschii, Daucus glochidiatus, Beta vulgaris, Daucus pusillus, Daucus muricatus, Daucus carota, Eucalyptus graudis, Nicotiana sylvestris, Nicotiana tomentosiformis, Nicotiana labacum, Solatium lycopersicum, Solanum tuberosum, Coffea canephora, Vitis vinifera, Erythrante guttata, Genlisea aurea, Cucumis sativus. Morus notabilis, Arabidopsis arenosa, Arabidopsis lyrata, Arabidopsis thaliana, Crucihimalaya himalaica, Crucihimalaya wallichii, Cardamine flexuosa, Lepidium virginicum, Capsella bursa pastoris, Olmarabidopsis pumila, Arabis hirsute, Brassica napus, Brassica oeleracia, Brassica rapa, Raphanus sativus, Brassica juncea, Brassica nigra, Eruca vesicaria subsp. sativa. Citrus sinensis, Jatropha curcas, Populus trichocarpa, Medicago truncatula, Cicer yamashitae, Cicer bijugum, Cicer arietinum, Cicer reticulatum, Cicer judaicum, Cajanus cajanifolius, Cajanus scarabaeoides. Phaseolus vulgaris. Glycine max. Astragalus sinicus, Lotus japonicas, Torenia fournieri, Allium cepa, Allium fistulosum, Allium sativum, and Allium tuberosum.

The application's sequence listing, which the Patent Office published only in electronic form, follows.

SEQUENCE LISTING (82 sequences)

SEQ ID NO: 1 - DNA, 6465 bp, Arabidopsis thaliana
atggactcagattcttctaaatcgcggattgatcagttttatgtatcgaagaagaggaaacaccagtcaccaaatttaaagtctgggaggaatgagaaaaatgtgaaggtgacaggggaaagatctcctggagacaaaggcactttggacagttacttgaaagcctctctggatgacaagagtactaccaatagtgggttgcaggcaaggcaggaagcgtttacaagaaaattggatttggaggtttctgcttcgtctgttggtcaaaatatacacccttgcctgcctaaacctgtaagttttgcaacttttaaggagtgtttgggccagaacggatctcaagatttgcataaagaaggtgttgcagctgaaactcatgctacagatggtttactctgtgctaaccagaaagataattcagaactacgagactttgccactagtttcttgtccttgtattgtagtggagtgcagtctgttgttggctcacctccacatcagaaggaaaatgaattgaagcgtcgaagcagttcatcatcacttgcccaagatatacaaatttctcacaagaggcgttgtgagtccgaaaatataccatcactagatgatcttacaaatcctctcgggagtaagcctgaatcactcgctaggaatggtaataatagagataaacctgtttcagaccctacaaagaagatgccgagcaatgaatctgttgaaattccaatgggcttgaggaagtgtagtaaggcgccagaatcatctgctcatctaactgaattccacacgcctggatcagccattaaatcatgtcctgttggaacccctaagtcaggatgtggtagctcaatgttctcacctggtgaggctttctggaatgaagcaattcaagttgctgatggtttgacaattccaattgaaaattttggttctgtagaagctaaagttagagatcaacatgtaactattctttcatgcagcaagaaaacagataaatgcactgaaaagttagagaggagtttagatttagatgaaatcagagtaaaggataaagatgccattggtttttcaaaggtagtggagaagcatgggagagattttaataaagaagtatatcagcttcctgtcaagaatcttgaacttttgtttcaagataagaacattaatggaggtattcaagagcgatgtgcttcatttgatcaaaataacattactctaggaagcagtaggatctctgaatctgctttcgtcggtaataaaggatgtgaaaatcttgatattgcaaataatgctcaggcagataaaggtttgataggcaagatgtatccagaacccgaaggaaagaaagttttactgtgtgaggaaaatcgtggtgtaagatctgtttctatgataagcaacatgaggaaaccagttggttctagtgaatccgaagaaagtcatactccttcaagctctcatcgtaattacgatggcttgagtctcagcacttggcttccctcagaagtttgcagtgtatacaataagaaaggaatatctaaactctatccttggcaggtcgagtgtcttcaggtagatggtgttttgcagaaaaggaatctagtatattgtgcttctacaagtgctggtaaaagttttgttgcagaagtcttgatgctgcgccgggtcataagaactggaaaaatggcattgcttgtactaccttatgtatccatttgtgccgagaaggcggaacaccttgaggtccttcttgaaccacttggtaagcatgttcgtagttactatggaaatcagggtggtggaacacttcctaaagacacttctgtggctgtctgcacgattgagaaggcaaactctttgataaatcgcttgcttgaagagggtcgtttgtcagaacttggaataatagttatagatgagctacatatggtgggtgaccaacataggggttatcttctggaacttatgttgacgaaacttcgttatgctgctggtgaaggcagttcagaatcaagtagtggtgagagttcagggactagcagtggcaaagctgatcctgctcatggcctacaaattgtgggtatgagtgctacaatgccaaatgttggcgcagttgctgactggcttcaagcagctttatatcagacagagtttcgaccagttcccctggaggagtatattaaagtaggtagcaccatttacaataaaaagatggaagttgtgaggactataccaaaagctgctgatatgggagggaaagacccggaccatatagttgagctttgtaacgaggttgttcaagagggcaattcagtgctgatattttgctcgagtcgaaaaggatgtgaatcaactgctaggcatatttcaaagctcattaaaaatgttcccgtaaacgttgatggtgaaaatagtgagtttatggatatcagatctgctattgatgccctgcgaaggtctccgtctggagtagatcctgtactagaagaaactcttccctctggggttgcctatcaccatgctggtcttacagtagaagaaagagagatagttgagacctgttaccgtaagggtcttgtacgtgtcttaacagctacatccactttggcggctggggttaacctgcctgcaaggagggttatttttcgacaaccaatgattggccgtgattttattgatggaacaaggtacaagcaaatgtctggtcgagctgggcgaactgggattgatacaaaaggagatagtgttttgatttgcaaacctggagaactcaagcgaataatggcacttcttaatgaaacctgcccaccattgcagtcttgtttatctgaggataaaaatggaatgactcatgcaatactagaagttgtggcaggtggaattgttcagactgccaaagatattcatcgctatgttaggtgtacacttctgaattctacaaagccctttcaagatgtggtcaaatcagctcaggattctcttcggtggctgtgccacaggaaatttcttgagtggaatgaagagacaaagttatacactacaacaccccttggacgtggatcttttggcagttcactctgcccagaggagtcacttatagtgctggatgatcttctacgagcacgtgaaggactagttatggcttctgatttgcatctggtctacttagtcacaccaattaatgttggtgttgagccaaactgggaattgtattatgaacggttcatggaactgtctcctttagagcagtctgttggcaatagagttggagtggtcgaacctttcctgatgcgcatggcacatggtgcaacagttcgcactctaaacagaccacaggatgtaaaaaaaaatttgcgtggagaatatgacagtcggcatggttcgacaagcatgaagatgctttcagatgaacaaatgcttcgagtgtgcaaaagattttttgttgctctcatcttgtcaaaattagttcaggaagcttctgtgactgaggtctgtgaagcctttaaagtggctagaggtatggttcaagcgctacaggagaacgctggaaggttttcttccatggtttcggtattctgtgagaggcttggatggcatgatttggaaggattagttgccaagttccagaaccgtgtttcatttggtgtcagggctgagattgttgaacttactagcattccatatataaagggttcaagagctagagcgctgtataaagctggcttgcgtacatctcaggcgatagctgaagcgtccatccctgaaattgtcaaagctctttttgaatcttcagcgtgggctgcagaaggtactggacaaagaaggatacacttgggattagccaagaaaatcaagaatggggctcgcaaaattgttcttgagaaagcagaagaggcgagggctgctgcattttctgcttttaagtcacttggtttggatgttaatgagctttcaaagcccttgccgttggctcctgctagtagtctcaatggacaagaaactactgaaagagacatttccagaggctctgttggtcccgatggattacaacaaagcatagaggggcacatggaatgtgaaaactttgatatggataatcacagagaaaagccaagtgaagtattaggtgatgctaccttaggggtttcatcagaaattaacttgaccagtcgtcttcctaattttagacctataggaactgcagtcggcactaatgggcctagtgctgttagtattctttccagtgatactttccctatccctgtttacgataacagagagataaaacctaaggacaatgttgagcagcatttgactaggaatgaccatattcctctgagtagtaataaggatggtacaggtgaaaagggtccagtaactgcaggaaatattagtggcggatttgattctttcttggaactttggggatctgctggcgaatttttcttcgatcttcactataataaactacaagatttgaattcacgcatctcttatgagatacatggaattgctatctgctggaattgctcccctgtatactatgtcaatcttaataaggatcttcccaacctggaatgtgtagaaaaacaaaagcttatcgaggatgcagttattggcaagagtgaggttctggcttctcacaacatgttggatgttataaagtctaggtggaacaaaatcagtaaaattatggggaatgtaaatacgagaaagttcacgtggaatttgaaagtccagattcaggtgcttaagagtcccgccatttcaatccaaagatgcactcgcttgaatcttccagaagggatcagggatgagttggtcgatggatcttggttaatgatgcctcctcttcacacaagccacaccattgacatgagcattgtgatatggattctttggccagatgaggaaagacactcaaatccaaacatcgataaggaagtaaagaaaaggctatccccagaggcagctgaagctgctaatcgcagtggcaggtggaggaatcagatccgaagggttgcccacaatggttgctgcagaagggttgctcaaacgagagccctttgttcagcactttggaagatccttgtttccgaagaacttcttcaagcactgacaaccattgaaatgccgctggttaatgtccttgcagacatggagctttggggtataggtatcgatatagaaggatgccttagggcacggaatatattgcgggataaactgcggtcccttgagaagaaagcatttgaattggctggcatgacattttcattgcacaacccagctgatattgcaaatgtgttgtttggacagttgaagttgcccatacctgaaaaccaatctaaagggaaacttcatccaagtactgataagcattgcttggatcttttaaggaatgagcatcctgttgtcccaattatcaaagaacaccgcactttggcaaagctcttaaattgtacacttggatcaatttgttcgcttgctaaactacgcttgagcacgcaaaggtacactttgcatggccgctggcttcaaacatcaacagcaactgggcggctttccatagaagagcctaatctccaatctgttgagcatgaagtagagttcaaattggataaaaatggaagggacgtaagttcagatgctgatcgttacaaaataaatgcacgtgatttctttgttcctactcaggaaaattggttactcttgacggcagattattcacagatagagttgcgacttatggcacacttttctagagattcctcgttgatttcaaagcttagtcagccagaaggcgatgtctttacgatgatagctgcaaaatggactggaaaagccgaggattctgttagtccacatgatagagatcagaccaaaagattgatctacggaattctttatggaatgggtgcaaacagactcgcagaacagcttgagtgcacctcagatgaagctaaggagaaaattcgaagctttaaaagttctttccctgcagtcacctcttggctaaacgaaacgatttcattctgccaggaaaaaggatacattcagactctcaagggaagaaggcggttcttgtcgaaaataaaatttgggaatgccaaagagaaatcgaaggctcaaaggcaagctgtaaattccatgtgccagggatctgctgctgatattatcaagattgcgatgataaacatatattctgcaattgctgaagatgttgataccgcagcatctagttcttcaagtgaaactagatttcacatgttgaagggacgatgccgaattcttctacaagtacatgatgaacttgtgctggaagttgatccttcttacgtaaaactagctgcaatgttgctacaaaccagcatggaaaatgcggtgtcacttcttgtccctcttcatgtgaaactgaaagttgggaaaacatggggttctttagagccgtttcagactgattaa

SEQ ID NO: 2 - protein, 2154 aa, Arabidopsis thaliana
MDSDSSKSRIDQFYVSKKRKHQSPNLKSGRNEKNVKVTGERSPGDKGTLDSYLKASLDDKSTTNSGLQARQEAFTRKLDLEVSASSVGQNIHPCLPKPVSFATFKECLGQNGSQDLHKEGVAAETHATDGLLCANQKDNSELRDFATSFLSLYCSGVQSVVGSPPHQKENELKRRSSSSSLAQDIQISHKRRCESENIPSLDDLTNPLGSKPESLARNGNNRDKPVSDPTKKMPSNESVEIPMGLRKCSKAPESSAHLTEFHTPGSAIKSCPVGTPKSGCGSSMFSPGEAFWNEAIQVADGLTIPIENFGSVEAKVRDQHVTILSCSKKTDKCTEKLERSLDLDEIRVKDKDAIGFSKVVEKHGRDFNKEVYQLPVKNLELLFQDKNINGGIQERCASFDQNNITLGSSRISESAFVGNKGCENLDIANNAQADKGLIGKMYPEPEGKKVLLCEENRGVRSVSMISNMRKPVGSSESEESHTPSSSHRNYDGLSLSTWLPSEVCSVYNKKGISKLYPWQVECLQVDGVLQKRNLVYCASTSAGKSFVAEVLMLRRVIRTGKMALLVLPYVSICAEKAEHLEVLLEPLGKHVRSYYGNQGGGTLPKDTSVAVCTIEKANSLINRLLEEGRLSELGIIVIDELHMVGDQHRGYLLELMLTKLRYAAGEGSSESSSGESSGTSSGKADPAHGLQIVGMSATMPNVGAVADWLQAALYQTEFRPVPLEEYIKVGSTIYNKKMEVVRTIPKAADMGGKDPDHIVELCNEVVQEGNSVLIFCSSRKGCESTARHISKLIKNVPVNVDGENSEFMDIRSAIDALRRSPSGVDPVLEETLPSGVAYHHAGLTVEEREIVETCYRKGLVRVLTATSTLAAGVNLPARRVIFRQPMIGRDFIDGTRYKQMSGRAGRTGIDTKGDSVLICKPGELKRIMALLNETCPPLQSCLSEDKNGMTHAILEVVAGGIVQTAKDIHRYVRCTLLNSTKPFQDVVKSAQDSLRWLCHRKFLEWNEETKLYTTTPLGRGSFGSSLCPEESLIVLDDLLRAREGLVMASDLHLVYLVTPINVGVEPNWELYYERFMELSPLEQSVGNRVGVVEPFLMRMAHGATVRTLNRPQDVKKNLRGEYDSRHGSTSMKMLSDEQMLRVCKRFFVALILSKLVQEASVTEVCEAFKVARGMVQALQENAGRFSSMVSVFCERLGWHDLEGLVAKFQNRVSFGVRAEIVELTSIPYIKGSRARALYKAGLRTSQAIAEASIPEIVKALFESSAWAAEGTGQRRIHLGLAKKIKNGARKIVLEKAEEARAAAFSAFKSLGLDVNELSKPLPLAPASSLNGQETTERDISRGSVGPDGLQQSIEGHMECENFDMDNHREKPSEVLGDATLGVSSEINLTSRLPNFRPIGTAVGTNGPSAVSILSSDTFPIPVYDNREIKPKDNVEQHLTRNDHIPLSSNKDGTGEKGPVTAGNISGGFDSFLELWGSAGEFFFDLHYNKLQDLNSRISYEIHGIAICWNCSPVYYVNLNKDLPNLECVEKQKLIEDAVIGKSEVLASHNMLDVIKSRWNKISKIMGNVNTRKFTWNLKVQIQVLKSPAISIQRCTRLNLPEGIRDELVDGSWLMMPPLHTSHTIDMSIVIWILWPDEERHSNPNIDKEVKKRLSPEAAEAANRSGRWRNQIRRVAHNGCCRRVAQTRALCSALWKILVSEELLQALTTIEMPLVNVLADMELWGIGIDIEGCLRARNILRDKLRSLEKKAFELAGMTFSLHNPADIANVLFGQLKLPIPENQSKGKLHPSTDKHCLDLLRNEHPVVPIIKEHRTLAKLLNCTLGSICSLAKLRLSTQRYTLHGRWLQTSTATGRLSIEEPNLQSVEHEVEFKLDKNGRDVSSDADRYKINARDFFVPTQENWLLLTADYSQIELRLMAHFSRDSSLISKLSQPEGDVFTMIAAKWTGKAEDSVSPHDRDQTKRLIYGILYGMGANRLAEQLECTSDEAKEKIRSFKSSFPAVTSWLNETISFCQEKGYIQTLKGRRRFLSKIKFGNAKEKSKAQRQAVNSMCQGSAADIIKIAMINIYSAIAEDVDTAASSSSSETRFHMLKGRCRILLQVHDELVLEVDPSYVKLAAMLLQTSMENAVSLLVPLHVKLKVGKTWGSLEPFQTD

SEQ ID NO: 3 - DNA, 7113 bp, Zea mays
aggcccgtaccgccctcctctgtagtccttccctccgccactccgcggctatgcccagcaattcaaaagaaaccgaacacccttccggaaattccctcgggcaatggcgtcgggctcgtctcgcccccaaatcgaccagttcttcccggccaagaagcggaggccctcgtcgcggaagggcgagtcgccgcgacccgggacgcagcatgagagccccggcggcgccaaggggtccctggaagggtacctcgtccgttcgccttgcaaccgtgccgtggcagcggcatcggtggtccccgtgggctcgcccaggggcggggacccgggcgccaggcgtagcctctcggccgcaatggatgtcgacgtcggttcctcggcttcggtggctgcggcggcaggtgacggggcagactttgatctcaggaggagcacggcggatttcttgtcccattcctgcagtgctatcctgcctttgaggggtgactgtgattacagcgagcagtgccagatgaagcagaagcggagtgcgtcccagtcattcttggttccttgtgacaacgactatgtcaagaagcagcgagttgcccattgtggtggctttgaagctctaaaggagttagatgataatgtagcttccatgaagcaatgcatcaatcaccatggtggctcagaggctgtggaggaatctgttgagggggaacatgtgagttgtgttgggttttcggccttgcaaagatgtagctttaccccaagtactgcacagataaaagttgggttttctctagcacctgtggaaaccctaaagtctgtatcgaggaattcccttacttcacctggtgaggagttctggaatgcagcaattgaactcgctgatgggatatctgcccaggctgataaggtccgtggaaggccagaatttgatgcagcagaagacaagtcatcttgtgcagtagcagcattctttaagactcttcctagatcaggaagggatgagcttgactgtcaaaacacagtaggcagcaatgatacacatcatatagagaaattgtcaaataaagttgaatcactggcagtaaactgtcagcatataattagctcacctttgcctgtgaagcagctagatttctttcatgaggatgatattaaagtttcaggttcaaaatttgaaacaaaaggcagctatgaaacttgtaatgcacaagcagaccgtgttccactgaaaggcagtggccgcctagaaaaggaaaatctcatggaccctgtggatgtgttgaagagaagtgctattaatttgcacactgattctgcagccatgagatgtcagggtgttttcaagtcaacaactgaagggaaggttcatccaactcaagaggctgaaagagattctaatcttattaggagagatctcaatcagccaacccacaatgaaaataaatcacttgctgcatattcaaataatcgcaagacttggatagattccaagagtaaagttgcttctcaggaagtggaagctagcacacctactagctccattcctctaaaggatcactcaaagatatcaagttggcttcctcctgacctttgtgctatatacatgaaaaaaggcatttcagagctgtacccttggcaggttgaatgtttacttgtagaaggtgtcttgggcaaaaggaatcttgtgtattgtgcatccacgagtgctggtaaaagttttgttgctgaagttctgatgttgaggcagatactgtcaactgggaatatggcaattcttgtccttccctatgtgtcaatatgcgctgaaaaggctgaacatcttgaacaacttcttgagccactgggtaggcatgtccgtagcttctacggaaaccaggggggaggctcacttcctaaagatacagcagttgctgtatgtaccatagagaaggcaaactctttggtaaacaagttgttggaggatggccgcctctctgaacttggtgtaattgtcatagatgaacttcatatggttggtgaccaacatagaggatatcttttagagctgatgttgacaaagcttcgatatgctgctggtgaagggactttacagtcatgtagcggagaagtttcaagttctagcagtgggaagattgcaagtcatgggttgcagataattggtatgagtgctactatgcccaacatcgctgcggtggctgattggcttcaagctgctctttatcaaactgactttcgaccagttccactggaggaattcataaaagttggtaatcaaatatttgataaagacatgaacgttgttcgtgtccttcccaaagtagctgaccatggtggcaaggatccagatcatattgttgaattgtgtaatgaggttgttcttcagggccattctgtgcttttgttttgctccagtcgtaaaggctgcgaatcaactgcaaggcatgttgccaagttcttgaaactaccctctgttggaacaactgatgttagttcggagttttcagatgctgcagctgctattgaggccttgaggaggtgccctgctggattggatccaatattgggagaaacccttccttttggtgttgcatatcatcatgctggtcttacggtcgaggagagggagattgtggaatcatgctaccgtaaaggccttgtccgtgttctgactgccacttcaactttagctgctggtgttaacttgcctgctagacgggttatattcaggcagcccaagataggtcgtgattttattgatgggactcgctatagacagatggctggtcgtgctggtcgaactggaatagacacaaaaggagaaagtatacttgtatgcaggcctgaagaggtcaagagagttacaggtattattagaagcaattgccctcccttggagtcctgcctctcagaagataaaaatggaatgactcatgcaattatggaggttgttgctggtgggattgttcaaactgcaaatgatattcatcgttatgtgcggtgtacgctgcttaattccacaagaccttttgatgatgtcgtgaagtcagctcaagactcccttcgttggttatgccataaaagctttcttgagtggaaccatgagaccaagatatactccgctactccccttggtagagctgcttttggaagttcactcaaccctgaggaatcattggttgttcttgatgatctttcgagggcaagagaaggctttgttctggcatctgatttacatttagtttacttggtcacacccataaatgtagaccttgaacctgattgggaattatattacgagaaattcatgcaactttcttctcttgagcagtcagtaggcaatcgggttggagtaattgaacccttcttgatgcacatggctcatggggcgtcgataccttttcgtgcaaggcctgagagaaacaccgggttaagtaacaagtctgcacaagctgctggaaatactcttgttagtgagcacacaatcagagtgtctaagcgcttttatgtggctttaatgttatcgaggcttgctcaggagattcctattgctgatgtttgtgagacatttaaggtcgccagaggtatgattcaggcactgcaggaaaatgctggcaggtttgcttcaatggtttctgcattttgtcaaaggcttggttggaatgatttagaaggccttgtttcgaaattccaaaatcgtgtctcttttggagttagggcagagattgcagaactgacatcaattccatttgtcaagggttcacgtgcaagggctttgtacaagtctggtctgcgtactcctgttgccattgctgaagcatctattcctgaaattgcaaaagctctttttgaatcttctgcttggtctgggcaaggtgattctggtttacgacgaatgcaatttggtgtagcaaaaaaaataaaaaatggagcccgcaaaattgtcctggaggaggcagaagccgccagagtagcagcattctcagctttcaagtcacttggtgtggaagttccccagttcactgcacctccactcgcagctattgaggaatatccaactcacgataccatagaccaagctaagttaaataagctagcttctggtacccattctagagatgataaaaatatgaatacttgctctgattatgctactccaagggcttctacatacagtctaagaaaggacacaagtcctgctccttccattcaaatgaaagagaatgcaggactatctaaaaatgtgcaaatcactagacagggagcatcatcatctttgtcaacagaaattgctgatggatctagtagagatgtggctgaaaaaggtcctgtccatgcatataacttcccagggggatttgattgttttcttgatcaatggtccacagctagtaattttttctttgatgttcattttatcaagagatcgatgaaaccatctttgaacctttttgaagtttttgggttggctgtctgttgggaaaaatctcccatatactactgcaacttcccaaaagatctagtcactactggcaacaataacatcaaggaaatgtggggtaattttcagagaagatgggaaaaaatagcggacattatgaaacaaaagagtgtccaaaaaatgacatggaatttaaagatccagatccaggcacttaaatcaccttatatttcttgccaacggcttgaaaggtttcatcttgaccataaaatgctggacaaagttgaagtgcttaacaactcatatatgttgttatcaccagtctctgtctacaatggattggatatatgtctgctggcgtgggttctatggccagatgaggaaagcagagcggttccaaatcttgagaagtttgtcaagaggcgacttcatagtcaagaagctgctgctgcaaatcgcgatggaagatggagaaatcagatgcacaaagcagcacacaatggctgctgtagacgtgctgcacagacacgggctttgtatactgttctgaagaaattacttactcaaaatctttctgttttggttgaaacaatcgaggccccattggttaatgttcttgctgatatggagctttggggaattggcgctgacatggatgcttgtctccgtgcgaggcatattataacaaaaaagctgaaggaactagagaaagaagcttacagattggcaggcaagaatttctctctaaatgctactgctgatatcgcagacattctatatacacacctaaaattgccagttccaaaaggctgtgagaaagggaagctgcatcctagcactgacaagcagtctttggaccacctaagggatcaacaccccattatcccattaattaaggaacacagaacattagcaaaactgttaaatggcacgttgtggtccatttgttcacgtgctcaattgtgcactcaatcacaaaggtacatcatacatggaaattggcttcagacgtcaactgccactggccgtttgtccatggaggagccaaatctgcagtgtgttgagcatgtggtggaattcgatacagggaaaagcgataaagattactcaagcatttcagttgatgatcatcataaaatcaatgcccgtgattttttcatacctaccaaggagaactggttattcataactgctgattactcacagattgagttgcgtttaatggctcacttttctaaagatcatatgttggttgaacttctaaagaaacctgatggtgatgtttttaccatgattgcttcaagatgggctgagaaagaagaggccttgatttcttccaaagagagagaaaacactaaaagattcatatatggcatcctttatggaatgggtgcaaactcccttgcagaacaacttcagtgcagcactgaggaagctgcacagaaaattcaaagctttaggagattttttcctggtgtttcctcatggttacatgaagttgtgttatcctgtcgccaaaaaggatttgttgagactttattaggccggcgacgtgttcttacaaaaataacggctggcaatagcaaagagaaagctaaagcacagaggcaagcagtaaattctatttgccagggttctgctgctgatattattaaggtggctatgattagagttcattcaataattactaacagaactagtgcagctgattccacagatgaagttacaaggaaattttcagaacttggtggccagtgtcaccttattttgcaggtgcatgatgagttggtattagaagttgatccgtgcatggtagcacaggctggaaggttgttacagatatgtatggaagaagcagcttcactattggtacctttgcgcacaaagataaaggtgggaaaaacttggggttcactagaaccattccatcctgagccttgttgatgcaaatggtgaatgtcagttggatgccaatgtttcatgacatgcaaggtcctggaagaaggctgaacaatttccaatatgccccacagggaccttggtgattctgtctggtgttcttcggtagaaccttcattgctatgtctacagtcttctgtcattgctgaccgtatgtgaaatcaacgcaacagcgaccagctccattactgaggatttgctatggactggtgattatcattatgattccatgtggcatgcaagaagcatatatatatcaccaatagatgctgttaaagggtttaaggtgtatttgaaaggtcttcctagttatactgcgaatcttttagataaacccttaagaaattggagggcctagtatatggtgatttttcttttgctaggcccagcgctaaaaaaccgattatggggtttattcaaagatgaaatttcatcctgtaactacaggttcaaggtgtatttggtttgatggatatcactatggacaagcgatggttggtttttgtacaagttggatgttgataaaaatgttggtatccatgccacacaaaaaaagcctaaccagcacccatattttgtaatccttgtcaagtatgttatatggtttacttgatagctctagcgaggctatccagtacctcaccttcaccctcatatttgtaatccttgtccacataattattagtatgttatatggttatttagtaattacgatggaaatatta

SEQ ID NO: 4 - DNA, 6270 bp, Zea mays
atggcgtcgggctcgtctcgcccccaaatcgaccagttcttcccggccaagaagcggaggccctcgtcgcggaagggcgagtcgccgcgacccgggacgcagcatgagagccccggcggcgccaaggggtccctggaagggtacctcgtccgttcgccttgcaaccgtgccgtggcagcggcatcggtggtccccgtgggctcgcccaggggcggggacccgggcgccaggcgtagcctctcggccgcaatggatgtcgacgtcggttcctcggcttcggtggctgcggcggcaggtgacggggcagactttgatctcaggaggagcacggcggatttcttgtcccattcctgcagtgctatcctgcctttgaggggtgactgtgattacagcgagcagtgccagatgaagcagaagcggagtgcgtcccagtcattcttggttccttgtgacaacgactatgtcaagaagcagcgagttgcccattgtggtggctttgaagctctaaaggagttagatgataatgtagcttccatgaagcaatgcatcaatcaccatggtggctcagaggctgtggaggaatctgttgagggggaacatgtgagttgtgttgggttttcggccttgcaaagatgtagctttaccccaagtactgcacagataaaagttgggttttctctagcacctgtggaaaccctaaagtctgtatcgaggaattcccttacttcacctggtgaggagttctggaatgcagcaattgaactcgctgatgggatatctgcccaggctgataaggtccgtggaaggccagaatttgatgcagcagaagacaagtcatcttgtgcagtagcagcattctttaagactcttcctagatcaggaagggatgagcttgactgtcaaaacacagtaggcagcaatgatacacatcatatagagaaattgtcaaataaagttgaatcactggcagtaaactgtcagcatataattagctcacctttgcctgtgaagcagctagatttctttcatgaggatgatattaaagtttcaggttcaaaatttgaaacaaaaggcagctatgaaacttgtaatgcacaagcagaccgtgttccactgaaaggcagtggccgcctagaaaaggaaaatctcatggaccctgtggatgtgttgaagagaagtgctattaatttgcacactgattctgcagccatgagatgtcagggtgttttcaagtcaacaactgaagggaaggttcatccaactcaagaggctgaaagagattctaatcttattaggagagatctcaatcagccaacccacaatgaaaataaatcacttgctgcatattcaaataatcgcaagacttggatagattccaagagtaaagttgcttctcaggaagtggaagctagcacacctactagctccattcctctaaaggatcactcaaagatatcaagttggcttcctcctgacctttgtgctatatacatgaaaaaaggcatttcagagctgtacccttggcaggttgaatgtttacttgtagaaggtgtcttgggcaaaaggaatcttgtgtattgtgcatccacgagtgctggtaaaagttttgttgctgaagttctgatgttgaggcagatactgtcaactgggaatatggcaattcttgtccttccctatgtgtcaatatgcgctgaaaaggctgaacatcttgaacaacttcttgagccactgggtaggcatgtccgtagcttctacggaaaccaggggggaggctcacttcctaaagatacagcagttgctgtatgtaccatagagaaggcaaactctttggtaaacaagttgttggaggatggccgcctctctgaacttggtgtaattgtcatagatgaacttcatatggttggtgaccaacatagaggatatcttttagagctgatgttgacaaagcttcgatatgctgctggtgaagggactttacagtcatgtagcggagaagtttcaagttctagcagtgggaagattgcaagtcatgggttgcagataattggtatgagtgctactatgcccaacatcgctgcggtggctgattggcttcaagctgctctttatcaaactgactttcgaccagttccactggaggaattcataaaagttggtaatcaaatatttgataaagacatgaacgttgttcgtgtccttcccaaagtagctgaccatggtggcaaggatccagatcatattgttgaattgtgtaatgaggttgttcttcagggccattctgtgcttttgttttgctccagtcgtaaaggctgcgaatcaactgcaaggcatgttgccaagttcttgaaactaccctctgttggaacaactgatgttagttcggagttttcagatgctgcagctgctattgaggccttgaggaggtgccctgctggattggatccaatattgggagaaacccttccttttggtgttgcatatcatcatgctggtcttacggtcgaggagagggagattgtggaatcatgctaccgtaaaggccttgtccgtgttctgactgccacttcaactttagctgctggtgttaacttgcctgctagacgggttatattcaggcagcccaagataggtcgtgattttattgatgggactcgctatagacagatggctggtcgtgctggtcgaactggaatagacacaaaaggagaaagtatacttgtatgcaggcctgaagaggtcaagagagttacaggtattattagaagcaattgccctcccttggagtcctgcctctcagaagataaaaatggaatgactcatgcaattatggaggttgttgctggtgggattgttcaaactgcaaatgatattcatcgttatgtgcggtgtacgctgcttaattccacaagaccttttgatgatgtcgtgaagtcagctcaagactcccttcgttggttatgccataaaagctttcttgagtggaaccatgagaccaagatatactccgctactccccttggtagagctgcttttggaagttcactcaaccctgaggaatcattggttgttcttgatgatctttcgagggcaagagaaggctttgttctggcatctgatttacatttagtttacttggtcacacccataaatgtagaccttgaacctgattgggaattatattacgagaaattcatgcaactttcttctcttgagcagtcagtaggcaatcgggttggagtaattgaacccttcttgatgcacatggctcatggggcgtcgataccttttcgtgcaaggcctgagagaaacaccgggttaagtaacaagtctgcacaagctgctggaaatactcttgttagtgagcacacaatcagagtgtctaagcgcttttatgtggctttaatgttatcgaggcttgctcaggagattcctattgctgatgtttgtgagacatttaaggtcgccagaggtatgattcaggcactgcaggaaaatgctggcaggtttgcttcaatggtttctgcattttgtcaaaggcttggttggaatgatttagaaggccttgtttcgaaattccaaaatcgtgtctcttttggagttagggcagagattgcagaactgacatcaattccatttgtcaagggttcacgtgcaagggctttgtacaagtctggtctgcgtactcctgttgccattgctgaagcatctattcctgaaattgcaaaagctctttttgaatcttctgcttggtctgggcaaggtgattctggtttacgacgaatgcaatttggtgtagcaaaaaaaataaaaaatggagcccgcaaaattgtcctggaggaggcagaagccgccagagtagcagcattctcagctttcaagtcacttggtgtggaagttccccagttcactgcacctccactcgcagctattgaggaatatccaactcacgataccatagaccaagctaagttaaataagctagcttctggtacccattctagagatgataaaaatatgaatacttgctctgattatgctactccaagggcttctacatacagtctaagaaaggacacaagtcctgctccttccattcaaatgaaagagaatgcaggactatctaaaaatgtgcaaatcactagacagggagcatcatcatctttgtcaacagaaattgctgatggatctagtagagatgtggctgaaaaaggtcctgtccatgcatataacttcccagggggatttgattgttttcttgatcaatggtccacagctagtaattttttctttgatgttcattttatcaagagatcgatgaaaccatctttgaacctttttgaagtttttgggttggctgtctgttgggaaaaatctcccatatactactgcaacttcccaaaagatctagtcactactggcaacaataacatcaaggaaatgtggggtaattttcagagaagatgggaaaaaatagcggacattatgaaacaaaagagtgtccaaaaaatgacatggaatttaaagatccagatccaggcacttaaatcaccttatatttcttgccaacggcttgaaaggtttcatcttgaccataaaatgctggacaaagttgaagtgcttaacaactcatatatgttgttatcaccagtctctgtctacaatggattggatatatgtctgctggcgtgggttctatggccagatgaggaaagcagagcggttccaaatcttgagaagtttgtcaagaggcgacttcatagtcaagaagctgctgctgcaaatcgcgatggaagatggagaaatcagatgcacaaagcagcacacaatggctgctgtagacgtgctgcacagacacgggctttgtatactgttctgaagaaattacttactcaaaatctttctgttttggttgaaacaatcgaggccccattggttaatgttcttgctgatatggagctttggggaattggcgctgacatggatgcttgtctccgtgcgaggcatattataacaaaaaagctgaaggaactagagaaagaagcttacagattggcaggcaagaatttctctctaaatgctactgctgatatcgcagacattctatatacacacctaaaattgccagttccaaaaggctgtgagaaagggaagctgcatcctagcactgacaagcagtctttggaccacctaagggatcaacaccccattatcccattaattaaggaacacagaacattagcaaaactgttaaatggcacgttgtggtccatttgttcacgtgctcaattgtgcactcaatcacaaaggtacatcatacatggaaattggcttcagacgtcaactgccactggccgtttgtccatggaggagccaaatctgcagtgtgttgagcatgtggtggaattcgatacagggaaaagcgataaagattactcaagcatttcagttgatgatcatcataaaatcaatgcccgtgattttttcatacctaccaaggagaactggttattcataactgctgattactcacagattgagttgcgtttaatggctcacttttctaaagatcatatgttggttgaacttctaaagaaacctgatggtgatgtttttaccatgattgcttcaagatgggctgagaaagaagaggccttgatttcttccaaagagagagaaaacactaaaagattcatatatggcatcctttatggaatgggtgcaaactcccttgcagaacaacttcagtgcagcactgaggaagctgcacagaaaattcaaagctttaggagattttttcctggtgtttcctcatggttacatgaagttgtgttatcctgtcgccaaaaaggatttgttgagactttattaggccggcgacgtgttcttacaaaaataacggctggcaatagcaaagagaaagctaaagcacagaggcaagcagtaaattctatttgccagggttctgctgctgatattattaaggtggctatgattagagttcattcaataattactaacagaactagtgcagctgattccacagatgaagttacaaggaaattttcagaacttggtggccagtgtcaccttattttgcaggtgcatgatgagttggtattagaagttgatccgtgcatggtagcacaggctggaaggttgttacagatatgtatggaagaagcagcttcactattggtacctttgcgcacaaagataaaggtgggaaaaacttggggttcactagaaccattccatcctgagccttgttga

SEQ ID NO: 5 - DNA, 5325 bp, Zea mays
atggcgtcgggctcgtctcgcccccaaatcgaccagttcttcccggccaagaagcggaggccctcgtcgcggaagggcgagtcgccgcgacccgggacgcagcatgagagccccggcggcgccaaggggtccctggaagggtacctcgtccgttcgccttgcaaccgtgccgtggcagcggcatcggtggtccccgtgggctcgcccaggggcggggacccgggcgccaggcgtagcctctcggccgcaatggatgtcgacgtcggttcctcggcttcggtggctgcggcggcaggtgacggggcagactttgatctcaggaggagcacggcggatttcttgtcccattcctgcagtgctatcctgcctttgaggggtgactgtgattacagcgagcagtgccagatgaagcagaagcggagtgcgtcccagtcattcttggttccttgtgacaacgactatgtcaagaagcagcgagttgcccattgtggtggctttgaagctctaaaggagttagatgataatgtagcttccatgaagcaatgcatcaatcaccatggtggctcagaggctgtggaggaatctgttgagggggaacatgtgagttgtgttgggttttcggccttgcaaagatgtagctttaccccaagtactgcacagataaaagttgggttttctctagcacctgtggaaaccctaaagtctgtatcgaggaattcccttacttcacctggtgaggagttctggaatgcagcaattgaactcgctgatgggatatctgcccaggctgataaggtccgtggaaggccagaatttgatgcagcagaagacaagtcatcttgtgcagtagcagcattctttaagactcttcctagatcaggaagggatgagcttgactgtcaaaacacagtaggcagcaatgatacacatcatatagagaaattgtcaaataaagttgaatcactggcagtaaactgtcagcatataattagctcacctttgcctgtgaagcagctagatttctttcatgaggatgatattaaagtttcaggttcaaaatttgaaacaaaaggcagctatgaaacttgtaatgcacaagcagaccgtgttccactgaaaggcagtggccgcctagaaaaggaaaatctcatggaccctgtggatgtgttgaagagaagtgctattaatttgcacactgattctgcagccatgagatgtcagggtgttttcaagtcaacaactgaagggaaggttcatccaactcaagaggctgaaagagattctaatcttattaggagagatctcaatcagccaacccacaatgaaaataaatcacttgctgcatattcaaataatcgcaagacttggatagattccaagagtaaagttgcttctcaggaagtggaagctagcacacctactagctccattcctctaaaggatcactcaaagatatcaagttggcttcctcctgacctttgtgctatatacatgaaaaaaggcatttcagagctgtacccttggcaggttgaatgtttacttgtagaaggtgtcttgggcaaaaggaatcttgtgtattgtgcatccacgagtgctggtaaaagttttgttgctgaagttctgatgttgaggcagatactgtcaactgggaatatggcaattcttgtccttccctatgtgtcaatatgcgctgaaaaggctgaacatcttgaacaacttcttgagccactgggtaggcatgtccgtagcttctacggaaaccaggggggaggctcacttcctaaagatacagcagttgctgtatgtaccatagagaaggcaaactctttggtaaacaagttgttggaggatggccgcctctctgaacttggtgtaattgtcatagatgaacttcatatggttggtgaccaacatagaggatatcttttagagctgatgttgacaaagcttcgatatgctgctggtgaagggactttacagtcatgtagcggagaagtttcaagttctagcagtgggaagattgcaagtcatgggttgcagataattggtatgagtgctactatgcccaacatcgctgcggtggctgattggcttcaagctgctctttatcaaactgactttcgaccagttccactggaggaattcataaaagttggtaatcaaatatttgataaagacatgaacgttgttcgtgtccttcccaaagtagctgaccatggtggcaaggatccagatcatattgttgaattgtgtaatgaggttgttcttcagggccattctgtgcttttgttttgctccagtcgtaaaggctgcgaatcaactgcaaggcatgttgccaagttcttgaaactaccctctgttggaacaactgatgttagttcggagttttcagatgctgcagctgctattgaggccttgaggaggtgccctgctggattggatccaatattgggagaaacccttccttttggtgttgcatatcatcatgctggtcttacggtcgaggagagggagattgtggaatcatgctaccgtaaaggccttgtccgtgttctgactgccacttcaactttagctgctggtgttaacttgcctgctagacgggttatattcaggcagcccaagataggtcgtgattttattgatgggactcgctatagacagatggctggtcgtgctggtcgaactggaatagacacaaaaggagaaagtatacttgtatgcaggcctgaagaggtcaagagagttacaggtattattagaagcaattgccctcccttggagtcctgcctctcagaagataaaaatggaatgactcatgcaattatggaggttgttgctggtgggattgttcaaactgcaaatgatattcatcgttatgtgcggtgtacgctgcttaattccacaagaccttttgatgatgtcgtgaagtcagctcaagactcccttcgttggttatgccataaaagctttcttgagtggaaccatgagaccaagatatactccgctactccccttggtagagctgcttttggaagttcactcaaccctgaggaatcattggttgttcttgatgatctttcgagggcaagagaaggctttgttctggcatctgatttacatttagtttacttggtcacacccataaatgtagaccttgaacctgattgggaattatattacgagaaattcatgcaactttcttctcttgagcagtcagtaggcaatcgggttggagtaattgaacccttcttgatgcacatggctcatggggcgtcgataccttttcgtgcaaggcctgagagaaacaccgggttaagtaacaagtctgcacaagctgctggaaatactcttgttagtgagcacacaatcagagtgtctaagcgcttttatgtggctttaatgttatcgaggcttgctcaggagattcctattgctgatgtttgtgagacatttaaggtcgccagaggtatgattcaggcactgcaggaaaatgctggcaggtttgcttcaatggtttctgcattttgtcaaaggcttggttggaatgatttagaaggccttgtttcgaaattccaaaatcgtgtctcttttggagttagggcagagattgcagaactgacatcaattccatttgtcaagggttcacgtgcaagggctttgtacaagtctggtctgcgtactcctgttgccattgctgaagcatctattcctgaaattgcaaaagctctttttgaatcttctgcttggtctgggcaaggtgattctggtttacgacgaatgcaatttggtgtagcaaaaaaaataaaaaatggagcccgcaaaattgtcctggaggaggcagaagccgccagagtagcagcattctcagctttcaagtcacttggtgtggaagttccccagttcactgcacctccactcgcagctattgaggaatatccaactcacgataccatagaccaagctaagttaaataagctagcttctggtacccattctagagatgataaaaatatgaatacttgctctgattatgctactccaagggcttctacatacagtctaagaaaggacacaagtcctgctccttccattcaaatgaaagagaatgcaggactatctaaaaatgtgcaaatcactagacagggagcatcatcatctttgtcaacagaaattgctgatggatctagtagagatgtggctgaaaaaggtcctgtccatgcatataacttcccagggggatttgattgttttcttgatcaatggtccacagctagtaattttttctttgatgttcattttatcaagagatcgatgaaaccatctttgaacctttttgaagtttttgggttggctgtctgttgggaaaaatctcccatatactactgcaacttcccaaaagatctagtcactactggcaacaataacatcaaggaaatgtggggtaattttcagagaagatgggaaaaaatagcggacattatgaaacaaaagagtgtccaaaaaatgacatggaatttaaagatccagatccaggcacttaaatcaccttatatttcttgccaacggcttgaaaggtttcatcttgaccataaaatgctggacaaagttgaagtgcttaacaactcatatatgttgttatcaccagtctctgtctacaatggattggatatatgtctgctggcgtgggttctatggccagatgaggaaagcagagcggttccaaatcttgagaagtttgtcaagaggcgacttcatagtcaagaagctgctgctgcaaatcgcgatggaagatggagaaatcagatgcacaaagcagcacacaatggctgctgtagacgtgctgcacagacacgggctttgtatactgttctgaagaaattacttactcaaaatctttctgttttggttgaaacaatcgaggccccattggttaatgttcttgctgatatggagctttggggaattggcgctgacatggatgcttgtctccgtgcgaggcatattataacaaaaaagctgaaggaactagagaaagaagcttacagattggcaggcaagaatttctctctaaatgctactgctgatatcgcagacattctatatacacacctaaaattgccagttccaaaaggctgtgagaaagggaagctgcatcctagcactgacaagcagtctttggaccacctaagtgtgttgagcatgtggtggaattcgatacagggaaaagcgataaagattactcaagcatttcagttgatgatcatcataaaatcaatgcccgtgattttttcatacctaccaaggagaactggttattcataa

SEQ ID NO: 6 - DNA, 6646 bp, Zea mays
gccctcctctgtagtccttccctccgccactccgcggctatgcccagcaattcaaaagaaaccgaacacccttccggaaattccctcgggcaatggcgtcgggctcgtctcgcccccaaatcgaccagttcttcccggccaagaagcggaggccctcgtcgcggaagggcgagtcgccgcgacccgggacgcagcatgagagccccggcggcgccaaggggtccctggaagggtacctcgtccgttcgccttgcaaccgtgccgtggcagcggcatcggtggtccccgtgggctcgcccaggggcggggacccgggcgccaggcgtagcctctcggccgcaatggatgtcgacgtcggttcctcggcttcggtggctgcggcggcaggtgacggggcagactttgatctcaggaggagcacggcggatttcttgtcccattcctgcagtgctatcctgcctttgaggggtgactgtgattacagcgagcagtgccagatgaagcagaagcggagtgcgtcccagtcattcttggttccttgtgacaacgactatgtcaagaagcagcgagttgcccattgtggtggctttgaagctctaaaggagttagatgataatgtagcttccatgaagcaatgcatcaatcaccatggtggctcagaggctgtggaggaatctgttgagggggaacatgtgagttgtgttgggttttcggccttgcaaagatgtagctttaccccaagtactgcacagataaaagttgggttttctctagcacctgtggaaaccctaaagtctgtatcgaggaattcccttacttcacctggtgaggagttctggaatgcagcaattgaactcgctgatgggatatctgcccaggctgataaggtccgtggaaggccagaatttgatgcagcagaagacaagtcatcttgtgcagtagcagcattctttaagactcttcctagatcaggaagggatgagcttgactgtcaaaacacagtaggcagcaatgatacacatcatatagagaaattgtcaaataaagttgaatcactggcagtaaactgtcagcatataattagctcacctttgcctgtgaagcagctagatttctttcatgaggatgatattaaagtttcaggttcaaaatttgaaacaaaaggcagctatgaaacttgtaatgcacaagcagaccgtgttccactgaaaggcagtggccgcctagaaaaggaaaatctcatggaccctgtggatgtgttgaagagaagtgctattaatttgcacactgattctgcagccatgagatgtcagggtgttttcaagtcaacaactgaagggaaggttcatccaactcaagaggctgaaagagattctaatcttattaggagagatctcaatcagccaacccacaatgaaaataaatcacttgctgcatattcaaataatcgcaagacttggatagattccaagagtaaagttgcttctcaggaagtggaagctagcacacctactagctccattcctctaaaggatcactcaaagatatcaagttggcttcctcctgacctttgtgctatatacatgaaaaaaggcatttcagagctgtacccttggcaggttgaatgtttacttgtagaaggtgtcttgggcaaaaggaatcttgtgtattgtgcatccacgagtgctggtaaaagttttgttgctgaagttctgatgttgaggcagatactgtcaactgggaatatggcaattcttgtccttccctatgtgtcaatatgcgctgaaaaggctgaacatcttgaacaacttcttgagccactgggtaggcatgtccgtagcttctacggaaaccaggggggaggctcacttcctaaagatacagcagttgctgtatgtaccatagagaaggcaaactctttggtaaacaagttgttggaggatggccgcctctctgaacttggtgtaattgtcatagatgaacttcatatggttggtgaccaacatagaggatatcttttagagctgatgttgacaaagcttcgatatgctgctggtgaagggactttacagtcatgtagcggagaagtttcaagttctagcagtgggaagattgcaagtcatgggttgcagataattggtatgagtgctactatgcccaacatcgctgcggtggctgattggcttcaagctgctctttatcaaactgactttcgaccagttccactggaggaattcataaaagttggtaatcaaatatttgataaagacatgaacgttgttcgtgtccttcccaaagtagctgaccatggtggcaaggatccagatcatattgttgaattgtgtaatgaggttgttcttcagggccattctgtgcttttgttttgctccagtcgtaaaggctgcgaatcaactgcaaggcatgttgccaagttcttgaaactaccctctgttggaacaactgatgttagttcggagttttcagatgctgcagctgctattgaggccttgaggaggtgccctgctggattggatccaatattgggagaaacccttccttttggtgttgcatatcatcatgctggtcttacggtcgaggagagggagattgtggaatcatgctaccgtaaaggccttgtccgtgttctgactgccacttcaactttagctgctggtgttaacttgcctgctagacgggttatattcaggcagcccaagataggtcgtgattttattgatgggactcgctatagacagatggctggtcgtgctggtcgaactggaatagacacaaaaggagaaagtatacttgtatgcaggcctgaagaggtcaagagagttacaggtattattagaagcaattgccctcccttggagtcctgcctctcagaagataaaaatggaatgactcatgcaattatggaggttgttgctggtgggattgttcaaactgcaaatgatattcatcgttatgtgcggtgtacgctgcttaattccacaagaccttttgatgatgtcgtgaagtcagctcaagactcccttcgttggttatgccataaaagctttcttgagtggaaccatgagaccaagatatactccgctactccccttggtagagctgcttttggaagttcactcaaccctgaggaatcattggttgttcttgatgatctttcgagggcaagagaaggctttgttctggcatctgatttacatttagtttacttggtcacacccataaatgtagaccttgaacctgattgggaattatattacgagaaattcatgcaactttcttctcttgagcagtcagtaggcaatcgggttggagtaattgaacccttcttgatgcacatggctcatggggcgtcgataccttttcgtgcaaggcctgagagaaacaccgggttaagtaacaagtctgcacaagctgctggaaatactcttgttagtgagcacacaatcagagtgtctaagcgcttttatgtggctttaatgttatcgaggcttgctcaggagattcctattgctgatgtttgtgagacatttaaggtcgccagaggtatgattcaggcactgcaggaaaatgctggcaggtttgcttcaatggtttctgcattttgtcaaaggcttggttggaatgatttagaaggccttgtttcgaaattccaaaatcgtgtctcttttggagttagggcagagattgcagaactgacatcaattccatttgtcaagggttcacgtgcaagggctttgtacaagtctggtctgcgtactcctgttgccattgctgaagcatctattcctgaaattgcaaaagctctttttgaatcttctgcttggtctgggcaaggtgattctggtttacgacgaatgcaatttggtgtagcaaaaaaaataaaaaatggagcccgcaaaattgtcctggaggaggcagaagccgccagagtagcagcattctcagctttcaagtcacttggtgtggaagttccccagttcactgcacctccactcgcagctattgaggaatatccaactcacgataccatagaccaagctaagttaaataagctagcttctggtacccattctagagatgataaaaatatgaatacttgctctgattatgctactccaagggcttctacatacagtctaagaaaggacacaagtcctgctccttccattcaaatgaaagagaatgcaggactatctaaaaatgtgcaaatcactagacagggagcatcatcatctttgtcaacagaaattgctgatggatctagtagagatgtggctgaaaaaggtcctgtccatgcatataacttcccagggggatttgattgttttcttgatcaatggtccacagctagtaattttttctttgatgttcattttatcaagagatcgatgaaaccatctttgaacctttttgaagtttttgggttggctgtctgttgggaaaaatctcccatatactactgcaacttcccaaaagatctagtcactactggcaacaataacatcaaggaaatgtggggtaattttcagagaagatgggaaaaaatagcggacattatgaaacaaaagagtgtccaaaaaatgacatggaatttaaagatccagatccaggcacttaaatcaccttatatttcttgccaacggcttgaaaggtttcatcttgaccataaaatgctggacaaagttgaagtgcttaacaactcatatatgttgttatcaccagtctctgtctacaatggattggatatatgtctgctggcgtgggttctatggccagatgaggaaagcagagcggttccaaatcttgagaagtttgtcaagaggcgacttcatagtcaagaagctgctgctgcaaatcgcgatggaagatggagaaatcagatgcacaaagcagcacacaatggctgctgtagacgtgctgcacagacacgggctttgtatactgttctgaagaaattacttactcaaaatctttctgttttggttgaaacaatcgaggccccattggttaatgttcttgctgatatggagctttggggaattggcgctgacatggatgcttgtctccgtgcgaggcatattataacaaaaaagctgaaggaactagagaaagaagcttacagattggcaggcaagaatttctctctaaatgctactgctgatatcgcagacattctatatacacacctaaaattgccagttccaaaaggctgtgagaaagggaagctgcatcctagcactgacaagcagtctttggaccacctaagtgtgttgagcatgtggtggaattcgatacagggaaaagcgataaagattactcaagcatttcagttgatgatcatcataaaatcaatgcccgtgattttttcatacctaccaaggagaactggttattcataactgctgattactcacagattgagttgcgtttaatggctcacttttctaaagatcatatgttggttgaacttctaaagaaacctgatggtgatgtttttaccatgattgcttcaagatgggctgagaaagaagaggccttgatttcttccaaagagagagaaaacactaaaagattcatatatggcatcctttatggaatgggtgcaaactcccttgcagaacaacttcagtgcagcactgaggaagctgcacagaaaattcaaagctttaggagattttttcctggtgtttcctcatggttacatgaagttgtgttatcctgtcgccaaaaaggatttgttgagactttattaggccggcgacgtgttcttacaaaaataacggctggcaatagcaaagagaaagctaaagcacagaggcaagcagtaaattctatttgccagggttctgctgctgatattattaaggtggctatgattagagttcattcaataattactaacagaactagtgcagctgattccacagatgaagttacaaggaaattttcagaacttggtggccagtgtcaccttattttgcaggtgcatgatgagttggtattagaagttgatccgtgcatggtagcacaggctggaaggttgttacagatatgtatggaagaagcagcttcactattggtacctttgcgcacaaagataaaggtgggaaaaacttggggttcactagaaccattccatcctgagccttgttgatgcaaatggtgaatgtcagttggatgccaatgtttcatgacatgcaaggtcctggaagaaggctgaacaatttccaatatgccccacagggaccttggtgattctgtctggtgttcttcggtagaaccttcattgctatgtctacagtcttctgtcattgctgaccgtatgtgaaatcaacgcaacagcgaccagctccattactgaggatttgctatggactggtgattatcattatgattccatgtggcatgcaagaagcatatatatatcaccaatagatgctgttaaagggtttaaggtgtatttgaaaggtcttcctagttatactgcgaatcttttagataaacccttaagaaattggagggcctagtatatggtgatttttcttttgctaggcccagcgctaaaaaaccgattatggggtttattcaaagatgaaatttcatcctgtaactacaggttcaaggtgta

SEQ ID NO: 7 - protein, 2089 aa, Zea mays
MASGSSRPQIDQFFPAKKRRPSSRKGESPRPGTQHESPGGAKGSLEGYLVRSPCNRAVAAASVVPVGSPRGGDPGARRSLSAAMDVDVGSSASVAAAAGDGADFDLRRSTADFLSHSCSAILPLRGDCDYSEQCQMKQKRSASQSFLVPCDNDYVKKQRVAHCGGFEALKELDDNVASMKQCINHHGGSEAVEESVEGEHVSCVGFSALQRCSFTPSTAQIKVGFSLAPVETLKSVSRNSLTSPGEEFWNAAIELADGISAQADKVRGRPEFDAAEDKSSCAVAAFFKTLPRSGRDELDCQNTVGSNDTHHIEKLSNKVESLAVNCQHIISSPLPVKQLDFFHEDDIKVSGSKFETKGSYETCNAQADRVPLKGSGRLEKENLMDPVDVLKRSAINLHTDSAAMRCQGVFKSTTEGKVHPTQEAERDSNLIRRDLNQPTHNENKSLAAYSNNRKTWIDSKSKVASQEVEASTPTSSIPLKDHSKISSWLPPDLCAIYMKKGISELYPWQVECLLVEGVLGKRNLVYCASTSAGKSFVAEVLMLRQILSTGNMAILVLPYVSICAEKAEHLEQLLEPLGRHVRSFYGNQGGGSLPKDTAVAVCTIEKANSLVNKLLEDGRLSELGVIVIDELHMVGDQHRGYLLELMLTKLRYAAGEGTLQSCSGEVSSSSSGKIASHGLQIIGMSATMPNIAAVADWLQAALYQTDFRPVPLEEFIKVGNQIFDKDMNVVRVLPKVADHGGKDPDHIVELCNEVVLQGHSVLLFCSSRKGCESTARHVAKFLKLPSVGTTDVSSEFSDAAAAIEALRRCPAGLDPILGETLPFGVAYHHAGLTVEEREIVESCYRKGLVRVLTATSTLAAGVNLPARRVIFRQPKIGRDFIDGTRYRQMAGRAGRTGIDTKGESILVCRPEEVKRVTGIIRSNCPPLESCLSEDKNGMTHAIMEVVAGGIVQTANDIHRYVRCTLLNSTRPFDDVVKSAQDSLRWLCHKSFLEWNHETKIYSATPLGRAAFGSSLNPEESLVVLDDLSRAREGFVLASDLHLVYLVTPINVDLEPDWELYYEKFMQLSSLEQSVGNRVGVIEPFLMHMAHGASIPFRARPERNTGLSNKSAQAAGNTLVSEHTIRVSKRFYVALMLSRLAQEIPIADVCETFKVARGMIQALQENAGRFASMVSAFCQRLGWNDLEGLVSKFQNRVSFGVRAEIAELTSIPFVKGSRARALYKSGLRTPVAIAEASIPEIAKALFESSAWSGQGDSGLRRMQFGVAKKIKNGARKIVLEEAEAARVAAFSAFKSLGVEVPQFTAPPLAAIEEYPTHDTIDQAKLNKLASGTHSRDDKNMNTCSDYATPRASTYSLRKDTSPAPSIQMKENAGLSKNVQITRQGASSSLSTEIADGSSRDVAEKGPVHAYNFPGGFDCFLDQWSTASNFFFDVHFIKRSMKPSLNLFEVFGLAVCWEKSPIYYCNFPKDLVTTGNNNIKEMWGNFQRRWEKIADIMKQKSVQKMTWNLKIQIQALKSPYISCQRLERFHLDHKMLDKVEVLNNSYMLLSPVSVYNGLDICLLAWVLWPDEESRAVPNLEKFVKRRLHSQEAAAANRDGRWRNQMHKAAHNGCCRRAAQTRALYTVLKKLLTQNLSVLVETIEAPLVNVLADMELWGIGADMDACLRARHIITKKLKELEKEAYRLAGKNFSLNATADIADILYTHLKLPVPKGCEKGKLHPSTDKQSLDHLRDQHPIIPLIKEHRTLAKLLNGTLWSICSRAQLCTQSQRYIIHGNWLQTSTATGRLSMEEPNLQCVEHVVEFDTGKSDKDYSSISVDDHHKINARDFFIPTKENWLFITADYSQIELRLMAHFSKDHMLVELLKKPDGDVFTMIASRWAEKEEALISSKERENTKRFIYGILYGMGANSLAEQLQCSTEEAAQKIQSFRRFFPGVSSWLHEVVLSCRQKGFVETLLGRRRVLTKITAGNSKEKAKAQRQAVNSICQGSAADIIKVAMIRVHSIITNRTSAADSTDEVTRKFSELGGQCHLILQVHDELVLEVDPCMVAQAGRLLQICMEEAASLLVPLRTKIKVGKTWGSLEPFHPEPC

SEQ ID NO: 8 - protein, 2089 aa, Zea mays; identical to SEQ ID NO: 7

SEQ ID NO: 9 - protein, 1774 aa, Zea mays
MASGSSRPQIDQFFPAKKRRPSSRKGESPRPGTQHESPGGAKGSLEGYLVRSPCNRAVAAASVVPVGSPRGGDPGARRSLSAAMDVDVGSSASVAAAAGDGADFDLRRSTADFLSHSCSAILPLRGDCDYSEQCQMKQKRSASQSFLVPCDNDYVKKQRVAHCGGFEALKELDDNVASMKQCINHHGGSEAVEESVEGEHVSCVGFSALQRCSFTPSTAQIKVGFSLAPVETLKSVSRNSLTSPGEEFWNAAIELADGISAQADKVRGRPEFDAAEDKSSCAVAAFFKTLPRSGRDELDCQNTVGSNDTHHIEKLSNKVESLAVNCQHIISSPLPVKQLDFFHEDDIKVSGSKFETKGSYETCNAQADRVPLKGSGRLEKENLMDPVDVLKRSAINLHTDSAAMRCQGVFKSTTEGKVHPTQEAERDSNLIRRDLNQPTHNENKSLAAYSNNRKTWIDSKSKVASQEVEASTPTSSIPLKDHSKISSWLPPDLCAIYMKKGISELYPWQVECLLVEGVLGKRNLVYCASTSAGKSFVAEVLMLRQILSTGNMAILVLPYVSICAEKAEHLEQLLEPLGRHVRSFYGNQGGGSLPKDTAVAVCTIEKANSLVNKLLEDGRLSELGVIVIDELHMVGDQHRGYLLELMLTKLRYAAGEGTLQSCSGEVSSSSSGKIASHGLQIIGMSATMPNIAAVADWLQAALYQTDFRPVPLEEFIKVGNQIFDKDMNVVRVLPKVADHGGKDPDHIVELCNEVVLQGHSVLLFCSSRKGCESTARHVAKFLKLPSVGTTDVSSEFSDAAAAIEALRRCPAGLDPILGETLPFGVAYHHAGLTVEEREIVESCYRKGLVRVLTATSTLAAGVNLPARRVIFRQPKIGRDFIDGTRYRQMAGRAGRTGIDTKGESILVCRPEEVKRVTGIIRSNCPPLESCLSEDKNGMTHAIMEVVAGGIVQTANDIHRYVRCTLLNSTRPFDDVVKSAQDSLRWLCHKSFLEWNHETKIYSATPLGRAAFGSSLNPEESLVVLDDLSRAREGFVLASDLHLVYLVTPINVDLEPDWELYYEKFMQLSSLEQSVGNRVGVIEPFLMHMAHGASIPFRARPERNTGLSNKSAQAAGNTLVSEHTIRVSKRFYVALMLSRLAQEIPIADVCETFKVARGMIQALQENAGRFASMVSAFCQRLGWNDLEGLVSKFQNRVSFGVRAEIAELTSIPFVKGSRARALYKSGLRTPVAIAEASIPEIAKALFESSAWSGQGDSGLRRMQFGVAKKIKNGARKIVLEEAEAARVAAFSAFKSLGVEVPQFTAPPLAAIEEYPTHDTIDQAKLNKLASGTHSRDDKNMNTCSDYATPRASTYSLRKDTSPAPSIQMKENAGLSKNVQITRQGASSSLSTEIADGSSRDVAEKGPVHAYNFPGGFDCFLDQWSTASNFFFDVHFIKRSMKPSLNLFEVFGLAVCWEKSPIYYCNFPKDLVTTGNNNIKEMWGNFQRRWEKIADIMKQKSVQKMTWNLKIQIQALKSPYISCQRLERFHLDHKMLDKVEVLNNSYMLLSPVSVYNGLDICLLAWVLWPDEESRAVPNLEKFVKRRLHSQEAAAANRDGRWRNQMHKAAHNGCCRRAAQTRALYTVLKKLLTQNLSVLVETIEAPLVNVLADMELWGIGADMDACLRARHIITKKLKELEKEAYRLAGKNFSLNATADIADILYTHLKLPVPKGCEKGKLHPSTDKQSLDHLSVLSMWWNSIQGKAIKITQAFQLMIIIKSMPVIFSYLPRRTGYS

SEQ ID NO: 10 - protein, 1774 aa, Zea mays; identical to SEQ ID NO: 9

SEQ ID NO: 11 - DNA, 5045 bp, Arabidopsis thaliana
actaaaacctttgtgacaacaattgaggttttccggaggaacagccattgactctctcgataactgtatccgtgttcttgttagaagatggaattggacccagatgatgttttcagagatgaagacgaagacccagaaaacgatttctttcaggtttttgaccttaatttcttcttggacttttaagtcaaagccaaaaaaaaatgaaaccctgatttatattggttagtgatgaatctgttggtgttgcaggaaaaagaggcttccaaagaatttgtagtctatctaattgatgcttctcccaaaatgttctgctctacttgcccctctgtgagtgtatacatgcaaataatcaaatcaagttttatttttgattctttagaatccttaccaaaatgttttaaatgtttcccaaaatgtttgaatttgtatcatactgttgtttgacaggaggaagaggacaaacaagaaagtcattttcacattgctgttagttgcattgctcagtcactcaaggctcatattatcaatcggtcaaatgatgaaatagctatatgtttctttaacactgtaagtttctggatgaaacgtgttgtattgttttctttcttttttggggtctttacttctttgtttgctaataattttgttgtcactggcagcgtgaaaagaagaatcttcaggatctaaatggtgtttatgtctttaatgttccagagagggatagtattgaccgtccaacagcgaggctgattaaagaattcgatctcatagaaggtagatgtgcttgactaacgttgtatctaacttttttgttatgctcgagtacataattctttgttaacttaaagagtttcgaatccctttcttagtaatcacttagtaagaaaagacattacatgttattataaaatctagattggtttagcaagagtttagcgcctgagatctcaatggtagtttctcaggctgaatcaaagattaaagagtggagtagtgtgctgaaagagagttatttactttgttgtttcgggtgcagaatcatttgataaggaaattggcagtcaaactggtattgtctcagattctcgggagaattccctttatagtgctctctgggttgcacaagcactactgcgcaaagggtataacaatcttatttcagttatgaatttggtgctaagtttgtgatatgtgttataatttggtctgtcatctgatccctgtgttggtaatattctgtaacaaaaacatatttagatctttaaagacagcagataaacgcatgtttctattcactaatgaagatgatccttttgggagtatgaggatctctgttaaagaggatatgacgaggacgacgttgcagagagctaaggtagtttagcttcaacccttacttagatatgatttacaatgaaatctatctaaataagcttattggtaatcaaattatagaataactaatggtttactttttattgcgttttggtgattccttaaggatgcacaagaccttggcatctcaatcgagcttctaccactcagtcaacctgataagcaattcaatataactctcttctacaaggttaatctcttaacaatctacttcttgtgttgaccttacaaacctggggctttataggcaatttctcttaattttctatttccatgattttttgtcaacatatttccaggatctaattggattaaacagtgatgaacttacggagttcatgccatcagttggacagaagtatgttctttcattctttattgcctgttggaatcccttatatgtctttgtcattccgttgctaatagtatcatagtactacactcagacaaagccgtgatggttttttgagaagtttccagacttcaaaataccactttgtaaatgttatctttaatttgaatagggatttataggaattcacatttagttctactttttactgaaatgtaactatttcagattagaggacatgaaggaccaactgaagaagcgtgtacttgccaagagaatagcaaaaagaattacgtttgtgatctgtgatggcttgtctattgaactgaatggttatgctttactccgtccggctattcctggcagcataacctggcttgactctacaactaatcttcctgtgaaggtaattttacaggaaagctcctttagttgaattgaaattttgtgcctttactcgtcttttgttcttttgacttccattacaagtgtggacctttgttttcagatcaaatctgtccttttttatatattatgaatcaagaatattccttgacatctatgttttggtgttatataagatctatgtttcctagatgtatgaggttttaagcaccttgtgtgggcttgtctgcaggtggaaagatcatatatctgtacggacactggagctataatgcaagatcctatacaacggattcagccttacaaaaagtaagcctcggaataacaccctgatttatttctggtttcctctaagcatagaagcaatggttgttttctgttagttattttatgtctagacgttttatatccttacaaaaataaattcaataggaagaaactacagcctcagaaatgtgaatctcttcttggctgtcatgaagtttaaaattcattctactcgataacggaaatgtttttgagcccttactctttcttgtccagtagaattgactttaattttttgttctcctttctagtcagaatatcatgtttactgtggaagagctatcccaagtaaaaagaatctcaactggacacttaagactgctggggttcaagccacttagttgcctcaaagattatcacaatttgaagccttctacatttctctatccaagtgataaggttacccgtttctcatttaagtgatggctgctgctaattttgttgtagtttgtttataatttttggaacttagaaaagcaaagactttcactttggtgctaaatagtttactcaaatttggacgttctcttagttatagagcttcatgaccttatatagctttgtttataatctttgttgtttcgtaccatcattatttcagttcttctatgcactttccaaaatggtgtcctatcagtagggagcttcagatatctaccatactttataattttaagcttcagagttatatatcttaacattttgctgagaagttttgaagcaagtgacttgaatacatgttttttcctcattgatcttgtaaagcagttgtgtcatggaatctcttacttttgacagctaattgatgcaggaagttatagggagcactcgtgcattcattgccttgcatagatccatgatacagcttgaacggtaagcatatttgatacataatttctggattttagacagactattacactgtagcacttgctgtgatatactaaccatataattactgcatttcctcttgtggtgtagttttgctgttgcattttatggcggtactacacctccgagattggttgctcttgttgctcaggtgagagaactctataaagacctttcttccacataagtatattccatcttgattttaaactttatttcctttttgttttgtgcgttgttaaacaagttactcaaatgtctttttcttaaacccaaacaggatgaaatcgagagtgatggtggtcaagtggagccaccagggataaacatgatatatcttccatatgctaatgatattagagatatcgacgaggcaagaaagaattgcttttgaaaagctacttggttccaacgttattaatgtttgttaaattttgactagttggtggaattttggcagttgcattcaaaaccaggtgtagctgctcctcgcgcatcagatgatcagcttaaaaaagcatcagctctaatgcgacgtctagagttaaaagacttttcggtttgccaatttgctaatcccggtaagttcaactctctattagttgtactgagctcctgatccgtaaactgttcatatatagaatctgaagtcgctctttgttgcagctttgcagagacactatgctatcttacaagccattgcactggatgaaaacgagcttcgtgaaaccagagatgaaacacttcctgacgaagaaggaatgaacaggttttcaacaaactttcatattctcctttttaacattccatcttataaagcaaaagaaaaagaaaaaatgttgggaacttatcgagtgagctctatttctcgttcttgcagacctgcagttgtaaaagcaatagaacaatttaagcagtcgatttatggcgatgaccctgatgaagaaagtgactcaggggcaaaggagaaatcaaaaaagcgaaaagccggtgacgcagatgatggaaaatatgactatatagagcttgcaaaaaccggaaaggtgaaagcaaaattctaagcattaatttagatttctgcttaatgatttcatctttttgtttcattgctttttagatctctacgtttaaataagctatcttcatgttctgttttctttgtttagctgaaggacttgactgtggtcgaactgaagacatatctgactgccaacaatctcctcgtcagcgggaagaaagaagttctgatcaatcggattctgactcacattggtaaataactttaaccgtgagttatataactcctgctagagaagctacgttttagttttattgaaaagcttgtctgtttttgatgggaactggacccatttatcttccgggtcattgttcatcgttttgcctcagctacaaagggttttagatttaactgtaatggtctcttttgggtaatcactaatttgtgatcttggctctaactttatggtggagtttatatttgacgaattccataaggttctttataattctccataggttataaaaaaaagtcttatgaatcttgaacaacaagatagaaacaagagataacaatttgtggtatgagcgtagttttattgatcataggttctttttttatggaaaaattataaaggaacttttggacctttgt

SEQ ID NO: 12 - protein, 621 aa, Arabidopsis thaliana
MELDPDDVFRDEDEDPENDFFQEKEASKEFVVYLIDASPKMFCSTCPSEEEDKQESHFHIAVSCIAQSLKAHIINRSNDEIAICFFNTREKKNLQDLNGVYVFNVPERDSIDRPTARLIKEFDLIEESFDKEIGSQTGIVSDSRENSLYSALWVAQALLRKGSLKTADKRMFLFTNEDDPFGSMRISVKEDMTRTTLQRAKDAQDLGISIELLPLSQPDKQFNITLFYKDLIGLNSDELTEFMPSVGQKLEDMKDQLKKRVLAKRIAKRITFVICDGLSIELNGYALLRPAIPGSITWLDSTTNLPVKVERSYICTDTGAIMQDPIQRIQPYKNQNIMFTVEELSQVKRISTGHLRLLGFKPLSCLKDYHNLKPSTFLYPSDKEVIGSTRAFIALHRSMIQLERFAVAFYGGTTPPRLVALVAQDEIESDGGQVEPPGINMIYLPYANDIRDIDELHSKPGVAAPRASDDQLKKASALMRRLELKDFSVCQFANPALQRHYAILQAIALDENELRETRDETLPDEEGMNRPAVVKAIEQFKQSIYGDDPDEESDSGAKEKSKKRKAGDADDGKYDYIELAKTGKLKDLTVVELKTYLTANNLLVSGKKEVLINRILTHIGK

SEQ ID NO: 13 - DNA, 1887 bp, Zea mays
atggacctggacccagaggggatcttccgcgacgacagcgatgaagacgaagacagtgtccaggagagggaggcgaacaaggagatggttgtctaccttgtcgacgcctcgcccaaaatgttcacccctgccaccacccaggacaatgaaaagcaggagacacatttccataccattgttaactgcatcacagagtctctgaagacacaaattattggtagatcttatgatgaagtcgcaatatgtttctttaacactaaagagaagaagaatttacaggactcagccggtgtttatgtttataatgtcggagacagagagcaacttgatagacctactgcaaaactcatcaaggatttttctttgatagaagattcttttatgagcaccattggaagtcgatatggaataacagctggatctcgggagaataccctgtataatgctctttgggttgctcaggcgctgttgcgcaagggatctgtgaagaccgtgagtaaacgaattcttatattcaccaatgaagatgatccttttggtactattacaggagcagtgaaaactgatatgattaggacaacacttcaacgtgcaaaggatgcacaagatcttggcctgtctattgaacttcttccactgagcccgcctgatgaccagttcaacatgtccctgttttatgcagatttgattggtctggatggagatgagatgaccgaatatttgccatctgctggtgataagctagaggatatgactaatcaactgagaaaacggataatgaagaagcgcagaatcaaaactctttcatttgcgattaccaatgatgtgtgcatagaagtcaatacatatgcgctggtccgtcctactactacagggacaatcacatggcttgattcactaagtaacctcccattaaaggttgagaggtctttcatatgcaatgatactggggctctacttcaggatgcacagacacgtttccagatgtacaatgacacaattgtcaaattttctgtacgtgaactctctgaggttaaaagggttgcaagccatcatcttcgccttataggtttcaagccattggattgcttgaaagattaccataacttaagaccatcgacatttatttatccgagtgatgagcgtatatttggaagcacctgtgttttcgttgctttacatagctcaatgttacgtcttggaaggtttgcacttgcattttatgggaatccaactcgaccacaactcatagcccttgttgctcaagaagaggttacttcgtctggtcgtcagtttgaaccgcctggcatgcacatgatctatcttccatactccgatgatattagatatcctgaagaagttcatgtgacttctgatgatgcaccgcgtgcaacagatgaacaaatcaagaaagcttcgaacatattcaaacgtattgatctgataaatttctctgcatgccaatttgctaacccagctttgcaaagacactatgggatcttggaggccttagctttaggcgaagatgagatgcctgatataaaggatgagaccctgcctgacgaagaaggcttgtctaagccaggggtagccaatgctattgaggaattcaagacttcagtctatggtgaaaattatgaccaagaggaggcagaagcggcagcagggaaagcttcccgtggtaatgcttcaaaaaagcggaaggaggtcactgatgcagctgcgcagataagtgctgcttatgattgggcagaacttgcagacaatggaaaactgaaggaaatgaccacggtggaattgagatcctacctgaccgcgcatgatctcccggtttctggtaagaaagatgtacttatcagcaggatcttgactcacctgggtaagtga

SEQ ID NO: 14 - DNA, 1953 bp, Zea mays
atggacctggacccagaggggatcttccgcgacgacagcgatgaagacgaagacagtgtccaggagagggaggcgaacaaggagatggttgtctaccttgtcgacgcctcgcccaaaatgttcacccctgccaccacccaggacaatgaaaagcaggagacacatttccataccattgttaactgcatcacagagtctctgaagacacaaattattggtagatcttatgatgaagtcgcaatatgtttctttaacactaaagagaagaagaatttacaggactcagccggtgtttatgtttataatgtcggagacagagagcaacttgatagacctactgcaaaactcatcaaggatttttctttgatagaagattcttttatgagcaccattggaagtcgatatggaataacagctggatctcgggagaataccctgtataatgctctttgggttgctcaggcgctgttgcgcaagggatctgtgaagaccgtgagtaaacgaattcttatattcaccaatgaagatgatccttttggtactattacaggagcagtgaaaactgatatgattaggacaacacttcaacgtgcaaaggatgcacaagatcttggcctgtctattgaacttcttccactgagcccgcctgatgaccagttcaacatgtccctgttttatgcagatttgattggtctggatggagatgagatgaccgaatatttgccatctgctggtgataagctagaggatatgactaatcaactgagaaaacggataatgaagaagcgcagaatcaaaactctttcatttgcgattaccaatgatgtgtgcatagaagtcaatacatatgcgctggtccgtcctactactacagggacaatcacatggcttgattcactaagtaacctcccattaaaggttgagaggtctttcatatgcaatgatactggggctctacttcaggatgcacagacacgtttccagatgtacaatgacacaattgtcaaattttctgtacgtgaactctctgaggttaaaagggttgcaagccatcatcttcgccttataggtttcaagccattggattgcttgaaagattaccataacttaagaccatcgacatttatttatccgagtgatgagcgtatatttggaagcacctgtgttttcgttgctttacatagctcaatgttacgtcttggaaggtttgcacttgcattttatgggaatccaactcgaccacaactcatagcccttgttgctcaagaagaggttacttcgtctggtcgtcagtttgaaccgcctggcatgcacatgatctatcttccatactccgatgatattagatatcctgaagaagtaaggactaacgttgtatttcaactttacgatctctgtaagctaattttcttgcttggtttgcaggttcatgtgacttctgatgatgcaccgcgtgcaacagatgaacaaatcaagaaagcttcgaacatattcaaacgtattgatctgataaatttctctgcatgccaatttgctaacccagctttgcaaagacactatgggatcttggaggccttagctttaggcgaatatgagatgcctgatataaaggatgagaccctgcctgacgaagaaggcttgtctaagccaggggtagccaatgctattgaggaattcaagacttcagtctatggtgaaaattatgaccaagaggaggcagaagcggcagcagggaaagcttcccgtggtaatgcttcaaaaaagcggaaggaggtcactgatgcagctgcgcagataagtgctgcttatgattgggcagaacttgcagacaatggaaaactgaaggaaatgaccacggtggaattgagatcctacctgaccgcgcatgatctcccggtttctggtaagaaagatgtacttatcagcaggatcttgactcacctgggtaagtga

SEQ ID NO: 15 - DNA, 2326 bp, Zea mays
tttctagaaccttcccacgccctgcgcccctttgctgtctcatacctgtcttaaaccctagctagtttctaggaccttcccacgccctgcgcccctttgctgtctcaaacctaccttaaacccttgttagtttctagaaccttccagacctccagttcccgacctcggcgccatggacctggacccagaggggatcttccgcgacgacagcgatgaagacgaagacagtgtccaggagagggaggcgaacaaggagatggttgtctaccttgtcgacgcctcgcccaaaatgttcacccctgccaccacccaggacaatgaaaagcaggagacacatttccataccattgttaactgcatcacagagtctctgaagacacaaattattggtagatcttatgatgaagtcgcaatatgtttctttaacactaaagagaagaagaatttacaggactcagccggtgtttatgtttataatgtcggagacagagagcaacttgatagacctactgcaaaactcatcaaggatttttctttgatagaagattcttttatgagcaccattggaagtcgatatggaataacagctggatctcgggagaataccctgtataatgctctttgggttgctcaggcgctgttgcgcaagggatctgtgaagaccgtgagtaaacgaattcttatattcaccaatgaagatgatccttttggtactattacaggagcagtgaaaactgatatgattaggacaacacttcaacgtgcaaaggatgcacaagatcttggcctgtctattgaacttcttccactgagcccgcctgatgaccagttcaacatgtccctgttttatgcagatttgattggtctggatggagatgagatgaccgaatatttgccatctgctggtgataagctagaggatatgactaatcaactgagaaaacggataatgaagaagcgcagaatcaaaactctttcatttgcgattaccaatgatgtgtgcatagaagtcaatacatatgcgctggtccgtcctactactacagggacaatcacatggcttgattcactaagtaacctcccattaaaggttgagaggtctttcatatgcaatgatactggggctctacttcaggatgcacagacacgtttccagatgtacaatgacacaattgtcaaattttctgtacgtgaactctctgaggttaaaagggttgcaagccatcatcttcgccttataggtttcaagccattggattgcttgaaagattaccataacttaagaccatcgacatttatttatccgagtgatgagcgtatatttggaagcacctgtgttttcgttgctttacatagctcaatgttacgtcttggaaggtttgcacttgcattttatgggaatccaactcgaccacaactcatagcccttgttgctcaagaagaggttacttcgtctggtcgtcagtttgaaccgcctggcatgcacatgatctatcttccatactccgatgatattagatatcctgaagaagttcatgtgacttctgatgatgcaccgcgtgcaacagatgaacaaatcaagaaagcttcgaacatattcaaacgtattgatctgataaatttctctgcatgccaatttgctaacccagctttgcaaagacactatgggatcttggaggccttagctttaggcgaagatgagatgcctgatataaaggatgagaccctgcctgacgaagaaggcttgtctaagccaggggtagccaatgctattgaggaattcaagacttcagtctatggtgaaaattatgaccaagaggaggcagaagcggcagcagggaaagcttcccgtggtaatgcttcaaaaaagcggaaggaggtcactgatgcagctgcgcagataagtgctgcttatgattgggcagaacttgcagacaatggaaaactgaaggaaatgaccacggtggaattgagatcctacctgaccgcgcatgatctcccggtttctggtaagaaagatgtacttatcagcaggatcttgactcacctgggtaagtgaagccgggtatccgaactgttagtttcctgagacccgactgacatctgtagtgctgtctcgcggatccttgtggaccgtaatcctcccccgtgcaggctacgtgccgattttttgtatagcgacaggacagcaccagttgccaatgtaacctgtgttaagtttcgtcttgtggtatcatctgcttgtcattgtcaacatgaaacataatgtaattctggatacttagacccacaatatggagcataactgcataaggtatgttaaagc

SEQ ID NO: 16 - DNA, 2399 bp, Zea mays
gggcagcagcgccgtagagccgtggtttcccacaaaaaaaacggcgccacggtagcgagtttctagaaccttcccacgccctgcgcccctttgctgtctcatacctgtcttaaaccctagctagtttctaggaccttcccacgccctgcgcccctttgctgtctcaaacctaccttaaacccttgttagtttctagaaccttccagacctccagttcccgacctcggcgccatggacctggacccagaggggatcttccgcgacgacagcgatgaagacgaagacagtgtccaggagagggaggcgaacaaggagatggttgtctaccttgtcgacgcctcgcccaaaatgttcacccctgccaccacccaggacaatgaaaagcaggagacacatttccataccattgttaactgcatcacagagtctctgaagacacaaattattggtagatcttatgatgaagtcgcaatatgtttctttaacactaaagagaagaagaatttacaggactcagccggtgtttatgtttataatgtcggagacagagagcaacttgatagacctactgcaaaactcatcaaggatttttctttgatagaagattcttttatgagcaccattggaagtcgatatggaataacagctggatctcgggagaataccctgtataatgctctttgggttgctcaggcgctgttgcgcaagggatctgtgaagaccgtgagtaaacgaattcttatattcaccaatgaagatgatccttttggtactattacaggagcagtgaaaactgatatgattaggacaacacttcaacgtgcaaaggatgcacaagatcttggcctgtctattgaacttcttccactgagcccgcctgatgaccagttcaacatgtccctgttttatgcagatttgattggtctggatggagatgagatgaccgaatatttgccatctgctggtgataagctagaggatatgactaatcaactgagaaaacggataatgaagaagcgcagaatcaaaactctttcatttgcgattaccaatgatgtgtgcatagaagtcaatacatatgcgctggtccgtcctactactacagggacaatcacatggcttgattcactaagtaacctcccattaaaggttgagaggtctttcatatgcaatgatactggggctctacttcaggatgcacagacacgtttccagatgtacaatgacacaattgtcaaattttctgtacgtgaactctctgaggttaaaagggttgcaagccatcatcttcgccttataggtttcaagccattggattgcttgaaagattaccataacttaagaccatcgacatttatttatccgagtgatgagcgtatatttggaagcacctgtgttttcgttgctttacatagctcaatgttacgtcttggaaggtttgcacttgcattttatgggaatccaactcgaccacaactcatagcccttgttgctcaagaagaggttacttcgtctggtcgtcagtttgaaccgcctggcatgcacatgatctatcttccatactccgatgatattagatatcctgaagaagtaaggactaacgttgtatttcaactttacgatctctgtaagctaattttcttgcttggtttgcaggttcatgtgacttctgatgatgcaccgcgtgcaacagatgaacaaatcaagaaagcttcgaacatattcaaacgtattgatctgataaatttctctgcatgccaatttgctaacccagctttgcaaagacactatgggatcttggaggccttagctttaggcgaatatgagatgcctgatataaaggatgagaccctgcctgacgaagaaggcttgtctaagccaggggtagccaatgctattgaggaattcaagacttcagtctatggtgaaaattatgaccaagaggaggcagaagcggcagcagggaaagcttcccgtggtaatgcttcaaaaaagcggaaggaggtcactgatgcagctgcgcagataagtgctgcttatgattgggcagaacttgcagacaatggaaaactgaaggaaatgaccacggtggaattgagatcctacctgaccgcgcatgatctcccggtttctggtaagaaagatgtacttatcagcaggatcttgactcacctgggtaagtgaagccgggtatccgaactgttagtttcctgagacccgactgacatctgtagtgctgtctcgcggatccttgtggaccgtaatcctcccccgtgcaggctacgtgccgattttttgtatagcgacaggacagcaccagttgccaatgtaacctgtgttaagtttcgtcttgtggtaaaaaaaaaaaaaaaaaaaaaaaaaaaaaaaaaaaaaaaaaa

SEQ ID NO: 17 - DNA, 6684 bp, Zea mays
gggtaccgggccccccctcgaggtcgacggtatcgataagcttgatatcgaattcgagctcggtacccgggggcgcgccggatctcgacattgattattgactagttattaatagtaatcaattacggggtcattagttcatagcccatatatggagttccgcgttacataacttacggtaaatggcccgcctggctgaccgcccaacgacccccgcccattgacgtcaataatgacgtatgttcccatagtaacgccaatagggactttccattgacgtcaatgggtggactatttacggtaaactgcccacttggcagtacatcaagtgtatcatatgccaagtacgccccctattgacgtcaatgacggtaaatggcccgcctggcattatgcccagtacatgaccttatgggactttcctacttggcagtacatctacgtattagtcatcgctattaccatgggtcgaggtgagccccacgttctgcttcactctccccatctcccccccctccccacccccaattttgtatttatttattttttaattattttgtgcagcgatgggggcggggggggggggggcgcgcgccaggcggggcggggcggggcgaggggcggggcggggcgaggcggagaggtgcggcggcagccaatcagagcggcgcgctccgaaagtttccttttatggcgaggcggcggcggcggcggccctataaaaagcgaagcgcgcggcgggcgggagtcgctgcgttgccttcgccccgtgccccgctccgcgccgcctcgcgccgcccgccccggctctgactgaccgcgttactcccacaggtgagcgggcgggacggcccttctcctccgggctgtaattagcgcttggtttaatgacggctcgtttcttttctgtggctgcgtgaaagccttaaagggctccgggagggccctttgtgcgggggggagcggctcggggggtgcgtgcgtgtgtgtgtgcgtggggagcgccgcgtgcggcccgcgctgcccggcggctgtgagcgctgcgggcgcggcgcggggctttgtgcgctccgcgtgtgcgcgaggggagcgcggccgggggcggtgccccgcggtgcgggggggctgcgaggggaacaaaggctgcgtgcggggtgtgtgcgtgggggggtgagcagggggtgtgggcgcggcggtcgggctgtaacccccccctgcacccccctccccgagttgctgagcacggcccggcttcgggtgcggggctccgtgcggggcgtggcgcggggctcgccgtgccgggcggggggtggcggcaggtgggggtgccgggcggggcggggccgcctcgggccggggagggctcgggggaggggcgcggcggccccggagcgccggcggctgtcgaggcgcggcgagccgcagccattgccttttatggtaatcgtgcgagagggcgcagggacttcctttgtcccaaatctggcggagccgaaatctgggaggcgccgccgcaccccctctagcgggcgcgggcgaagcggtgcggcgccggcaggaaggaaatgggcggggagggccttcgtgcgtcgccgcgccgccgtccccttctccatctccagcctcggggctgccgcagggggacggctgccttcgggggggacggggcagggcggggttcggcttctggcgtgtgaccggcggctctagagcctctgctaaccatgttcatgccttcttctttttcctacagatccttaattaataatacgactcactataggggccgccaccatgcccaagaagaagaggaaggtgatccagtgtatccagagtgtgtacaccagtaagatcataagcagcgatcgggatctcctggcagtggtgttctatggaaccgagaaagataaaaattcagtgaatttcaaaaatatttatgtcttacaagatttggacaacccaggcgctaagcgagtgctagagctcgaccagtttaagggacaacaggggaagaagcacttccgagacacggttggccatgggtctgactactctttgagtgaagtgctctgggtctgtgccaacctcttcagcgacgtccagctcaagatgagtcacaagaggatcatgctgttcaccaatgaagacgacccccatggccgtgacagtgctaaagccagccgggccaggaccaaagccagcgacctccgggacactgggatcttccttgacttgatgcatctgaagaagccaggaggctttgatgtatccgtgttctacagggacatcatcaccaccgctgaggacgaggaccttggggttcacttcgaggagtcaagcaagctggaagacctgctaaggaaggttcgagccaaggagaccaaaaagcgagttctgtccaggttaaagtttaagctcggtgaagacgtagtactcatggtgggcatttataacttggtccagaaagctaacaagccttttccagtgagactctatcgggaaacaaatgaaccagtgaaaaccaagacaaggacttttaatgtaaacaccggcagtctactcctgcctagtgacaccaagcggtctctgacttacgggacacgtcagattgtgctggagaaagaggagacagaggagctgaagcggtttgatgagccaggtttgatcctcatgggctttaagcccacggtgatgctgaagaagcagcactacctgaggccctctctgttcgtgtacccagaggagtccctggtcagtgggagctcaaccttgttcagcgctctgctcaccaagtgtgtggagaagaaggtcatagcagtgtgtagatacacaccccggaagaacgtctccccgtattttgtggctttggtgccccaggaagaggagctggatgatcagaacattcaggtgactccaggaggcttccagcttgtcttcctcccttatgccgatgacaagcggaaggtgccctttactgagaaggtgacggccaaccaggagcagatagacaagatgaaggccattgttcaaaagctccgcttcacatacaggagcgacagttttgagaatccagtcctgcagcagcacttccgcaacctggaggccctagctttggacatgatggagtcggagcaagtggtagatctgacactacccaaggttgaagccataaagaaaagactgggttccctggcagatgagtttaaagaacttgtctatcctccaggttataatcccgagggaaaagttgccaagagaaaacaagatgatgaaggttctacgagtaaaaagcccaaggtagagttatcagaagaagagctgaaggcccattttcgtaagggcacactgggtaagctcactgtacctacactgaaggacatatgcaaggctcatgggcttaagagtgggccgaagaagcaggaactgctagatgctcttatcagacacttggagaagaactgaggatccacgcgtaaatgattgcagatccactagttctagagctcgctgatcagcctcgactgtgccttctagttgccagccatctgttgtttgcccctcccccgtgccttccttgaccctggaaggtgccactcccactgtcctttcctaataaaatgaggaaattgcatcgcattgtctgagtaggtgtcattctattctggggggtggggtggggcaggacagcaagggggaggattgggaagacaatagcaggcatgctggggatgcggtgggctctatggcttctgaggcggaaagaaccagctggggctcgagatccactagttctagcctcgaggctagagcggccgccaccgcggtggagctccaattcgccctatagtgagtcgtattacgcgcgctcactggccgtcgttttacaacgtcgtgactgggaaaaccctggcgttacccaacttaatcgccttgcagcacatccccctttcgccagctggcgtaatagcgaagaggcccgcaccgatcgcccttcccaacagttgcgcagcctgaatggcgaatgggacgcgccctgtagcggcgcattaagcgcggcgggtgtggtggttacgcgcagcgtgaccgctacacttgccagcgccctagcgcccgctcctttcgctttcttcccttcctttctcgccacgttcgccggctttccccgtcaagctctaaatcgggggctccctttagggttccgatttagtgctttacggcacctcgaccccaaaaaacttgattagggtgatggttcacgtagtgggccatcgccctgatagacggtttttcgccctttgacgttggagtccacgttctttaatagtggactcttgttccaaactggaacaacactcaaccctatctcggtctattcttttgatttataagggattttgccgatttcggcctattggttaaaaaatgagctgatttaacaaaaatttaacgcgaattttaacaaaatattaacgcttacaatttaggtggcacttttcggggaaatgtgcgcggaacccctatttgtttatttttctaaatacattcaaatatgtatccgctcatgagacaataaccctgataaatgcttcaataatattgaaaaaggaagagtatgagtattcaacatttccgtgtcgcccttattcccttttttgcggcattttgccttcctgtttttgctcacccagaaacgctggtgaaagtaaaagatgctgaagatcagttgggtgcacgagtgggttacatcgaactggatctcaacagcggtaagatccttgagagttttcgccccgaagaacgttttccaatgatgagcacttttaaagttctgctatgtggcgcggtattatcccgtattgacgccgggcaagagcaactcggtcgccgcatacactattctcagaatgacttggttgagtactcaccagtcacagaaaagcatcttacggatggcatgacagtaagagaattatgcagtgctgccataaccatgagtgataacactgcggccaacttacttctgacaacgatcggaggaccgaaggagctaaccgcttttttgcacaacatgggggatcatgtaactcgccttgatcgttgggaaccggagctgaatgaagccataccaaacgacgagcgtgacaccacgatgcctgtagcaatggcaacaacgttgcgcaaactattaactggcgaactacttactctagcttcccggcaacaattaatagactggatggaggcggataaagttgcaggaccacttctgcgctcggcccttccggctggctggtttattgctgataaatctggagccggtgagcgtgggtctcgcggtatcattgcagcactggggccagatggtaagccctcccgtatcgtagttatctacacgacggggagtcaggcaactatggatgaacgaaatagacagatcgctgagataggtgcctcactgattaagcattggtaactgtcagaccaagtttactcatatatactttagattgatttaaaacttcatttttaatttaaaaggatctaggtgaagatcctttttgataatctcatgaccaaaatcccttaacgtgagttttcgttccactgagcgtcagaccccgtagaaaagatcaaaggatcttcttgagatcctttttttctgcgcgtaatctgctgcttgcaaacaaaaaaaccaccgctaccagcggtggtttgtttgccggatcaagagctaccaactctttttccgaaggtaactggcttcagcagagcgcagataccaaatactgtccttctagtgtagccgtagttaggccaccacttcaagaactctgtagcaccgcctacatacctcgctctgctaatcctgttaccagtggctgctgccagtggcgataagtcgtgtcttaccgggttggactcaagacgatagttaccggataaggcgcagcggtcgggctgaacggggggttcgtgcacacagcccagcttggagcgaacgacctacaccgaactgagatacctacagcgtgagctatgagaaagcgccacgcttcccgaagggagaaaggcggacaggtatccggtaagcggcagggtcggaacaggagagcgcacgagggagcttccagggggaaacgcctggtatctttatagtcctgtcgggtttcgccacctctgacttgagcgtcgatttttgtgatgctcgtcaggggggcggagcctatggaaaaacgccagcaacgcggcctttttacggttcctggccttttgctggccttttgctcacatgttctttcctgcgttatcccctgattctgtggataaccgtattaccgcctttgagtgagctgataccgctcgccgcagccgaacgaccgagcgcagcgagtcagtgagcgaggaagcggaagagcgcccaatacgcaaaccgcctctccccgcgcgttggccgattcattaatgcagctggcacgacaggtttcccgactggaaagcgggcagtgagcgcaacgcaattaatgtgagttagctcactcattaggcaccccaggctttacactttatgcttccggctcgtatgttgtgtggaattgtgagcggataacaatttcacacaggaaacagctatgaccatgattacgccaagcgcgcaattaaccctcactaaagggaacaaaagct

SEQ ID NO: 18 - protein, 628 aa, Zea mays
MDLDPEGIFRDDSDEDEDSVQEREANKEMVVYLVDASPKMFTPATTQDNEKQETHFHTIVNCITESLKTQIIGRSYDEVAICFFNTKEKKNLQDSAGVYVYNVGDREQLDRPTAKLIKDFSLIEDSFMSTIGSRYGITAGSRENTLYNALWVAQALLRKGSVKTVSKRILIFTNEDDPFGTITGAVKTDMIRTTLQRAKDAQDLGLSIELLPLSPPDDQFNMSLFYADLIGLDGDEMTEYLPSAGDKLEDMTNQLRKRIMKKRRIKTLSFAITNDVCIEVNTYALVRPTTTGTITWLDSLSNLPLKVERSFICNDTGALLQDAQTRFQMYNDTIVKFSVRELSEVKRVASHHLRLIGFKPLDCLKDYHNLRPSTFIYPSDERIFGSTCVFVALHSSMLRLGRFALAFYGNPTRPQLIALVAQEEVTSSGRQFEPPGMHMIYLPYSDDIRYPEEVHVTSDDAPRATDEQIKKASNIFKRIDLINFSACQFANPALQRHYGILEALALGEDEMPDIKDETLPDEEGLSKPGVANAIEEFKTSVYGENYDQEEAEAAAGKASRGNASKKRKEVTDAAAQISAAYDWAELADNGKLKEMTTVELRSYLTAHDLPVSGKKDVLISRILTHLGK

SEQ ID NO: 19 - protein, 650 aa, Zea mays
MDLDPEGIFRDDSDEDEDSVQEREANKEMVVYLVDASPKMFTPATTQDNEKQETHFHTIVNCITESLKTQIIGRSYDEVAICFFNTKEKKNLQDSAGVYVYNVGDREQLDRPTAKLIKDFSLIEDSFMSTIGSRYGITAGSRENTLYNALWVAQALLRKGSVKTVSKRILIFTNEDDPFGTITGAVKTDMIRTTLQRAKDAQDLGLSIELLPLSPPDDQFNMSLFYADLIGLDGDEMTEYLPSAGDKLEDMTNQLRKRIMKKRRIKTLSFAITNDVCIEVNTYALVRPTTTGTITWLDSLSNLPLKVERSFICNDTGALLQDAQTRFQMYNDTIVKFSVRELSEVKRVASHHLRLIGFKPLDCLKDYHNLRPSTFIYPSDERIFGSTCVFVALHSSMLRLGRFALAFYGNPTRPQLIALVAQEEVTSSGRQFEPPGMHMIYLPYSDDIRYPEEVRTNVVFQLYDLCKLIFLLGLQVHVTSDDAPRATDEQIKKASNIFKRIDLINFSACQFANPALQRHYGILEALALGEYEMPDIKDETLPDEEGLSKPGVANAIEEFKTSVYGENYDQEEAEAAAGKASRGNASKKRKEVTDAAAQISAAYDWAELADNGKLKEMTTVELRSYLTAHDLPVSGKKDVLISRILTHLGK

SEQ ID NO: 20 - protein, 650 aa, Zea mays; identical to SEQ ID NO: 19

SEQ ID NO: 21 - DNA, 3862 bp, Arabidopsis thaliana
taaaataaaaattcttcgtcttcttcgtttcaccatctctctttttctcatcattcttcttcttcttcttcttcttcttcttcttcttcaccttcttcttccagcacaactcctcaatggcacgaaatcgggtataatttcttctaatcttacttcgttacatattaaccttcgtttttttttcttataggtttcttcagaaatcaattcaatgaaattaataccttcttcagcttctgtttgttttccatcgatgtttctttttctacttagtttcgtgcatgttattctacattgctgcataccatttcttctttgataattctgtttatgctgattttgacttcgttttatgctcaattatgttctggatatctcattgattcatttttggaactgttcttggagtaatttagggttttaatttgtcatttcatttgagagaaattagtcctgctcgattttacttttaattcgatgtgtgtgtgtgtgttcatcggaagcaggagggtttggttttggtgctcgatgtaggtcctgcgatgcgtagtgttctccctgatgttgaaaaggcatgttcaatgctacttcagaagaaggtatacgatctttttcttctgaaattattgttcatgaattttggatctttccttattggttttggtttgttgttgcagttgatttacaacaagtatgatgaagttggaattgttgtctttggaactgaaggtctctctatctattcttattactgattaaagtaggaagttaggaatctatcctctttagtactgcaatggttctttcttggagtattatcggcttgttgatgtactttgataataatgtttcatgtgacctctgcagaaactggaaacgagcttgctagggagataggtggatatgagaatgttacagttttaaggaatatcagagttgttgatgaattagcggcagagcatgtgaagcagcttcctcgaggaactgtagctggagactgtatcctgctagctagtttaccgcttatttttactgtttcgctaccattttcttggttctttaactggcttcagttcttgatgctttaattgttgggatggatatgcttataaagatgtatggtaatgcacacaaggggaaaaaacggatgtgtctcatcacgaacgcagcttgtcctaccaaagatccatttgaagggacgaaagatgatcaagtcagcactattgctatgaaaatggctgcggagggaattaagatggagagcattgttatgaggtctaatttaagtggtgatgctcatgagagagtaatagaggagaatgatcatctgttgactttattctccagcaacgcgattgccaaaacagtgaatgttgatagtccactctcactgcttggttccttaaagacccggagggtggctccagttactttgttcaggggtgaccttgaaattaacccaacaatgaagattaaggtaacgcttttttggttgtgtcttttgcttgttgtgcagagtttatagatatcatcgaacttgctgttctttgttgttattcagtacttaagttcattcacgtttatataattgttcgtgaaattttttctgaaaataagaatgtgaaattttgtaggtgtgggtttataagaaagtggctgaggagagacttcccactctaaaaatgtattctgacaaagcgcctccaactgacaagtttgccaaacatgaagtaaaagttgattatgattacaaagttactgcagaatctactgaggttattgctccagaagaaaggatcaagggctttcgctatggacctcaggttattcctatatcaccagatcagatagaaacactcaagtttaaaactgacaaaggcatgaagcttctgggatttactgaggcgtcaaatatactgcggtaaacataaagacatatatctatgtttgcctgtaaactcttggttgttaaagtttgagagaatgctgttttgtgtttttctctgcatgtcaatgaagacattattacatgaaagacgtgaatatagttgttcctgatccaagcaaagaaaaatctgtacttgccgtatctgctattgcaagagaaatgaaagaaacaaacaaggtagcaattgtacgatgtgtctggagaaatggacaaggcaatgtggttgttggggtcctgactccaaatgtgtctgaaagagatgatactgtaagttaatagtgttatcttctgaaaggaaaatttctatccgaatctgactatttgatgatcatttacctttttcgcagcctgattcgttttacttcaatgtgctacctttcgccgaggatgtccgcgagtttccatttccttctttcaacaagcttccttcatcatggaagccagatgaacaacaacaagcagtagcagataatttggttaagatgcttgaccttgcaccttctgcggaagaggaagtactaaagcctgatcttactcctaacccggttttgcaggtaataccagttttattctgctttgtataattgttgcaggtaatttgtcaactcatactgatgaaatatttttatcagcgcttttatgaataccttgagttgaaatcgaaatccacggatgctactttacctccaatggatggaactttcaagagacttatggagcaggaccctgaactctcttccaacaataaatccataatggacacgtttcgtggaagttttgaagtcaaggagaatccaaaggtgtgttcccctgaatcatcagctttcagaaaggaacctgaatgatctcattcataactctttgacatgactttcattgcagttgaagaaggcttctaagagattgttgcgggataaaccatcgggttcagatgatgaagacaatcgcatgattacttatgacgccaaagagaacaaaattgatatagtcggagatgcaaacccaattcaagattttgaagccatgatatcccgcagagataaaactgactggaccgagaaagcaatcacacaaatgaaaaacctaataatgaagcttgtagaaaattgtaccgacgagggtgacaaagcattggaatgtgtactcgctcttcgtaaaggctgcgtcttggagcaggtctcttctattttctctatctcgactttgtgcattttctctcaaaactttttcatggagtcttcttaaatatgtgagcaggagccaaagcaattcaatgagttcttgaaccatctattcaagttatgccaagaaagaaacttatctcatcttctcgaacatttcatgtcaaagaagatcactttgattcccaaatccgaagcagcggacaggttagttatataaaccatcttctgtttaataactaaattggtctgatgaatgtttttgttggtcattgctttaaccagtgatatagtagacgagaacgctggggatttcatcgttaaacaagagtcaatgctcgagagctaacaaagtcttcgctataactgatattgtaactgtgttgtccaaaacggtaccgttttcacttttgatatcaagaacgctcagggaaattttttaccttccataactagtttcagaaacaaccctttttgttcgataaccagaagttttataggaaaactaatttaaaaagaaaaaacaatttgacatgagatttcccttagagcatcttcattggagtatctcaatgagatccccaatcaaaaaaataataattaaaaaataaaaagtatgagagaaggagaattaagtttttttctgctagaaactttgaaaaactattctcatccaatttggacagctgtcacaatactattacagtagaaactctataaattaataatgttg

SEQ ID NO: 22 - protein, 680 aa, Arabidopsis thaliana
MARNREGLVLVLDVGPAMRSVLPDVEKACSMLLQKKLIYNKYDEVGIVVFGTEETGNELAREIGGYENVTVLRNIRVVDELAAEHVKQLPRGTVAGDFLDALIVGMDMLIKMYGNAHKGKKRMCLITNAACPTKDPFEGTKDDQVSTIAMKMAAEGIKMESIVMRSNLSGDAHERVIEENDHLLTLFSSNAIAKTVNVDSPLSLLGSLKTRRVAPVTLFRGDLEINPTMKIKVWVYKKVAEERLPTLKMYSDKAPPTDKFAKHEVKVDYDYKVTAESTEVIAPEERIKGFRYGPQVIPISPDQIETLKFKTDKGMKLLGFTEASNILRHYYMKDVNIVVPDPSKEKSVLAVSAIAREMKETNKVAIVRCVWRNGQGNVVVGVLTPNVSERDDTPDSFYFNVLPFAEDVREFPFPSFNKLPSSWKPDEQQQAVADNLVKMLDLAPSAEEEVLKPDLTPNPVLQRFYEYLELKSKSTDATLPPMDGTFKRLMEQDPELSSNNKSIMDTFRGSFEVKENPKLKKASKRLLRDKPSGSDDEDNRMITYDAKENKIDIVGDANPIQDFEAMISRRDKTDWTEKAITQMKNLIMKLVENCTDEGDKALECVLALRKGCVLEQEPKQFNEFLNHLFKLCQERNLSHLLEHFMSKKITLIPKSEAADSDIVDENAGDFIVKQESMLES

SEQ ID NO: 23 - protein, 663 aa, Arabidopsis thaliana
MARNREGLVLVLDVGPAMRSVLPDVEKACSMLLQKKLIYNKYDEVGIVVFGTEETGNELAREIGGYENVTVLRNIRVVDELAAEHVKQLPRGTVAGDFLDALIVGMDMLIKMYGNAHKGKKRMCLITNAACPTKDPFEGTKDDQVSTIAMKMAAEGIKMESIVMRSNLSGDAHERVIEENDHLLTLFSSNAIAKTVNVDSPLSLLGSLKTRRVAPVTLFRGDLEINPTMKIKVWVYKKVAEERLPTLKMYSDKAPPTDKFAKHEVKVDYDYKVTAESTEVIAPEERIKGFRYGPQVIPISPDQIETLKFKTDKGMKLLGFTEASNILRHYYMKDVNIVVPDPSKEKSVLAVSAIAREMKETNKVAIVRCVWRNGQGNVVVGVLTPNVSERDDTPDSFYFNVLPFAEDVREFPFPSFNKLPSSWKPDEQQQAVADNLVKMLDLAPSAEEEVLKPDLTPNPVLQRFYEYLELKSKSTDATLPPMDGTFKRLMEQDPELSSNNKSIMDTFRGSFEVKENPKLKKASKRLLRDKPSGSDDEDNRMITYDAKENKIDIVGDANPIQDFEAMISRRDKTDWTEKAITQMKNLIMKLVENCTDEGDKALECVLALRKGCVLEQEPKQFNEFLNHLFKLCQERNLSHLLEHFMSKKITLIPKSEAADRLVI

SEQ ID NO: 24 - protein, 635 aa, Arabidopsis thaliana
MFNATSEEETGNELAREIGGYENVTVLRNIRVVDELAAEHVKQLPRGTVAGDFLDALIVGMDMLIKMYGNAHKGKKRMCLITNAACPTKDPFEGTKDDQVSTIAMKMAAEGIKMESIVMRSNLSGDAHERVIEENDHLLTLFSSNAIAKTVNVDSPLSLLGSLKTRRVAPVTLFRGDLEINPTMKIKVWVYKKVAEERLPTLKMYSDKAPPTDKFAKHEVKVDYDYKVTAESTEVIAPEERIKGFRYGPQVIPISPDQIETLKFKTDKGMKLLGFTEASNILRHYYMKDVNIVVPDPSKEKSVLAVSAIAREMKETNKVAIVRCVWRNGQGNVVVGVLTPNVSERDDTPDSFYFNVLPFAEDVREFPFPSFNKLPSSWKPDEQQQAVADNLVKMLDLAPSAEEEVLKPDLTPNPVLQRFYEYLELKSKSTDATLPPMDGTFKRLMEQDPELSSNNKSIMDTFRGSFEVKENPKLKKASKRLLRDKPSGSDDEDNRMITYDAKENKIDIVGDANPIQDFEAMISRRDKTDWTEKAITQMKNLIMKLVENCTDEGDKALECVLALRKGCVLEQEPKQFNEFLNHLFKLCQERNLSHLLEHFMSKKITLIPKSEAADSDIVDENAGDFIVKQESMLES

SEQ ID NO: 25 - DNA, 2498 bp, Zea mays
cttcctccgcactccgccgcgccggccagtcgtcttgtccccctcgccgcctccgcgctcgtcttgctcctcttcggctcccctccccgccacctcgtcccaccccgccccttgggttgagttgagctactcgaccgtcagtcaattcctgcaccaggcgttgggcgggttttcatgggggcagcataaaagcctcttcggttcttcccctagctctgcctcgcggcaagtccccctccgctacgttcgccatggctcgcaacagggaagtggtgattttgctgttggatgttgggccttcgatgcatggagtgctgctagaggtgaagaacgtatgcttgactcttgtgcataagaagctagtttataacaggagcgatgaagttggtattgtcctctttggtactaaaggaacatgcaatgagcttgcaaaggacattgggggctataagcatgtgacggtcatacatgatattaaagttgtagatgaaggaacggcacaggctctgcaaaaccttccattaggatctgcccctggtgattttctggattctattgttgttggcttggatatggtgattaggaaatttggtattaccaaagggaagcggcggctctgtctaatcactagtgcacaagaactgttaagagatccgcctgaggggaccaaagaagatcaggtggacaccattgcagacatgttgaaaaaacacaatatcaagatggagtgcattattttcagagaaccgggagtgcatcataatgatgtaatggaagaaaatgaccgactattgcatcagttcagaaatagatcagtagcaaaggtagttcaggttgacaacccaacatcactgttgggtgctctcaagacaagaaatgtgctcccagttaccgttttcaggggagacctggaagtgaactccaattttaaaataaaggtgtgggtttataagaaaacagctgaggaaaaattccccactttgaagaagtattcggacaaagctcctccaagtgataaatttgcttctcatgaagtcaaagttgattatgagtacaagagtgttgttgagccagacaaagttgttccaccagaccagaggattaaggggtatctctatggtcctcaagttattcctgtatcaaatgctgaatgggaggcagtcaagttcaagccagagaaaggtgtgaagcttctaggatttacagatagatccagcgtaccacggcaccaatttatgaaagatgtatgcctgtttatacctgaaccaggcaacatgaaagcaagtcttgcagtttctgcgatagcaagagcaatgcatcaaatgaacaaggttgctatagtgcgatgtgtgtggaggcaaggtcaagggaatgttgctattggtgtattgacgccaaacatttcatcagtgaacactatccaagattccttttacttcaatgtgctcccatttgctgaggacatcagagagtttcagtttcggtccttcagcagcctgccatcatcatctcagcccactgaagaacaacaagaagctgcagataacctagtgaagatgttagacctagcaccacctggaagagaggtcctcaagcctgagtttacgccaaatcccatcttggagagattttacagttaccttgatctcaagtcaaagcagccagatgcaaatgtcccaccgcttgaaagatctctaaggaggataaccgaacctgatcctgatgtggttggccaacaaacacaattaatccagaatttaagcaaagcttttgtgctgaaggagaaccccaagaaaaagaaagcacgaacacaggaattgttggcatatactggtgcaggtgatcaagctaaatctgtagaggacagagttctggaaaatacacatccttcaacagagaatgttgtggcaatcagagattcaaatccagttcaagattttgaggccatgctggctaagagatctagctcaacatggactcagaaggctattggagatatgcagaattacatagcagctttgttacagaactccagtgatgggggcaactatcaaaaagcacttgaatgttttgcttctctgcggaaggcctgtattattgaacaggaaccacaggaattcaaccagttcctaacgaacatttacgagagattgaaggaaggtgatgctgccaagttctttcaacttctctcctcaaaaaacatttcacttatcaacaaagaggaagcgcctgacagtgatgtgactgaagagatggcaagaagtttctacctgaaacgagaaaaggcgtctcagtaggagctggaagaagccggtaactcgaagcgccttgggtttggagatcatcggaggactggattgtgaaactgggtatctgcatgttttgaaactgggtatctgggtggaactggaactaatactcaaactctctgggttgagtcactgttttgctgcacaatctgctgcctactacgtttcgactaaaaaaaaaaaaaaaaa

SEQ ID NO: 26 - DNA, 2419 bp, Zea mays
gacccacgcgtccgctcgaccgtcagtcaattcctgcaccaggcgttgggcgggttttatgggggcagcataaaagcctcttcggttcttcccctagctctgcctcgcggcaagtccccctccgctacgttcgccatggctcgcaacagggaagtggtgattttgctgttggatgttgggccttcgatgcatggagtgctgctagaggtgaagaacgtatgcttgactcttgtgcataagaagctagtttataacaggagcgatgaagttggtattgtcctctttggtactaaaggaacatgcaatgagcttgcaaaggacattgggggctataagcatgtgacggtcatacatgatattaaagttgtagatgaaggaacggcacaggctctgcaaaaccttccattaggatctgcccctggtgattttctggattctattgttgttggcttggatatggtgattaggaaatttggtattaccaaagggaagcggcggctctgtctaatcactagtgcacaagaactgttaagagatccgcctgaggggaccaaagaagatcaagtggacaccattgcagacatgttgaaaaaacacaatatcaagatggagtgcattattttcagagaaccgggagtgcatcataatgatataatggaagaaaatgaccgactattgcatcagttcagaaatcgatcagtagcaaaggtaattcaggttgacaacccaacatcactgttgggtgctctcaagacaagaaatgtgctcccagttaccgttttcaggggagacctggaagtgaactccaattttaaaataaaggtgtgggtatataagaaaacagctgaggaaaaattccccactttgaagaagtattcggacaaagctcctccaagtgataaatttgcttctcatgaagtcaaagttgattatgagtacaagagtgttgttgagccagacaaagttgttccaccagaccagaggattaaggggtatctctatggtcctcaagttattcctgtatcaaatgctgaatgggaggcagtcaagttcaagccagagaaaggtgtgaagcttctaggatttacagatagatccagcgtaccacggcaccaatttatgaaagatgtatgcctgtttatacctgagccaggcaacatgaaagcaagtcttgcagtttctgcgatagcaagagcaatgcatcaaatgaacaaggttgctatagtgcgatgtgtgtggaggcaaggtcaagggaatgttgctattggtgtattgacgccaaacatttcatcagtgaacaatatccaagattccttttacttcaatgtgctcccatttgctgaggacatcagagagtttcagtttcggtccttcagcagcctgccatcatcatctcagcccactgaagaacaacaagaagctgcagataacctagtgaagatgttagacctagcaccacctggaagagaggtcctcaagcctgagtttacgccaaatcccatcttggagagattttacagttaccttgatctcaagtcaaagcagccagatgcaaatgtcccaccgcttgaaagatctctaaggaggataaccgaacctgatcctgatgtggttggccaacaaacacaattaatccagaatttaagcaaagcttttgtgctgaaggagaaccccaagaaaaagaaagcacgaacacaggacatgttggcatatactggtgcaggtgatcaagctaaatctgtagaggacagagttctggaaaatacacatccttcaacagagagtgttgtggcaatcagagattcaaatccagttcaagattttgaggccatgctggctaagagatctagctcaacatggactcagaaggctattggagatatgcagaattacatagcagctttgttacagaactccagtgatgggggcaactatcaaaaagcacttgaatgttttgcttctctgcggaaggcctgtattattgaacaggaaccacaggaattcaaccagttcctaacgaacatttacgagagattgaaggaaggtgatgctgccaagttctttcaacttctctcctcaaaaaacatttcacttatcaacaaagaggaagcgcctgacagtgatgtgactgaagagatggcaagaagtttctacctgaaacgagaaaaggtatctcagtaggagctggaagaagccggtaactcgaagcgccttgggtttggagatcatcggaggaatggattgtgaaactgggtatctgtgtgggggcatgttttgaaactgggtatctgggtggaactggaactaatactcaaactctctgggttgagtcactgttttgctgcacaatctgctgcctactacgtttcgactagattcagcttttaaaaaaaaaaaaaaaaaaaaaaaaaaaaaaaaa

SEQ ID NO: 27 - DNA, 2046 bp, Zea mays
atggctcgcaacagggaagtggtgattttgctgttggatgttgggccttcgatgcatggagtgctgctagaggtgaagaacgtatgcttgactcttgtgcataagaagctagtttataacaggagcgatgaagttggtattgtcctctttggtactaaaggaacatgcaatgagcttgcaaaggacattgggggctataagcatgtgacggtcatacatgatattaaagttgtagatgaaggaacggcacaggctctgcaaaaccttccattaggatctgcccctggtgattttctggattctattgttgttggcttggatatggtgattaggaaatttggtattaccaaagggaagcggcggctctgtctaatcactagtgcacaagaactgttaagagatccgcctgaggggaccaaagaagatcaggtggacaccattgcagacatgttgaaaaaacacaatatcaagatggagtgcattattttcagagaaccgggagtgcatcataatgatgtaatggaagaaaatgaccgactattgcatcagttcagaaatagatcagtagcaaaggtagttcaggttgacaacccaacatcactgttgggtgctctcaagacaagaaatgtgctcccagttaccgttttcaggggagacctggaagtgaactccaattttaaaataaaggtgtgggtttataagaaaacagctgaggaaaaattccccactttgaagaagtattcggacaaagctcctccaagtgataaatttgcttctcatgaagtcaaagttgattatgagtacaagagtgttgttgagccagacaaagttgttccaccagaccagaggattaaggggtatctctatggtcctcaagttattcctgtatcaaatgctgaatgggaggcagtcaagttcaagccagagaaaggtgtgaagcttctaggatttacagatagatccagcgtaccacggcaccaatttatgaaagatgtatgcctgtttatacctgaaccaggcaacatgaaagcaagtcttgcagtttctgcgatagcaagagcaatgcatcaaatgaacaaggttgctatagtgcgatgtgtgtggaggcaaggtcaagggaatgttgctattggtgtattgacgccaaacatttcatcagtgaacactatccaagattccttttacttcaatgtgctcccatttgctgaggacatcagagagtttcagtttcggtccttcagcagcctgccatcatcatctcagcccactgaagaacaacaagaagctgcagataacctagtgaagatgttagacctagcaccacctggaagagaggtcctcaagcctgagtttacgccaaatcccatcttggagagattttacagttaccttgatctcaagtcaaagcagccagatgcaaatgtcccaccgcttgaaagatctctaaggaggataaccgaacctgatcctgatgtggttggccaacaaacacaattaatccagaatttaagcaaagcttttgtgctgaaggagaaccccaagaaaaagaaagcacgaacacaggaattgttggcatatactggtgcaggtgatcaagctaaatctgtagaggacagagttctggaaaatacacatccttcaacagagaatgttgtggcaatcagagattcaaatccagttcaagattttgaggccatgctggctaagagatctagctcaacatggactcagaaggctattggagatatgcagaattacatagcagctttgttacagaactccagtgatgggggcaactatcaaaaagcacttgaatgttttgcttctctgcggaaggcctgtattattgaacaggaaccacaggaattcaaccagttcctaacgaacatttacgagagattgaaggaaggtgatgctgccaagttctttcaacttctctcctcaaaaaacatttcacttatcaacaaagaggaagcgcctgacagtgatgtgactgaagagatggcaagaagtttctacctgaaacgagaaaaggcgtctcagtag

SEQ ID NO: 28 - DNA, 2419 bp, Zea mays; identical to SEQ ID NO: 26

SEQ ID NO: 29 - protein, 681 aa, Zea mays
MARNREVVILLLDVGPSMHGVLLEVKNVCLTLVHKKLVYNRSDEVGIVLFGTKGTCNELAKDIGGYKHVTVIHDIKVVDEGTAQALQNLPLGSAPGDFLDSIVVGLDMVIRKFGITKGKRRLCLITSAQELLRDPPEGTKEDQVDTIADMLKKHNIKMECIIFREPGVHHNDVMEENDRLLHQFRNRSVAKVVQVDNPTSLLGALKTRNVLPVTVFRGDLEVNSNFKIKVWVYKKTAEEKFPTLKKYSDKAPPSDKFASHEVKVDYEYKSVVEPDKVVPPDQRIKGYLYGPQVIPVSNAEWEAVKFKPEKGVKLLGFTDRSSVPRHQFMKDVCLFIPEPGNMKASLAVSAIARAMHQMNKVAIVRCVWRQGQGNVAIGVLTPNISSVNTIQDSFYFNVLPFAEDIREFQFRSFSSLPSSSQPTEEQQEAADNLVKMLDLAPPGREVLKPEFTPNPILERFYSYLDLKSKQPDANVPPLERSLRRITEPDPDVVGQQTQLIQNLSKAFVLKENPKKKKARTQELLAYTGAGDQAKSVEDRVLENTHPSTENVVAIRDSNPVQDFEAMLAKRSSSTWTQKAIGDMQNYIAALLQNSSDGGNYQKALECFASLRKACIIEQEPQEFNQFLTNIYERLKEGDAAKFFQLLSSKNISLINKEEAPDSDVTEEMARSFYLKREKASQ

SEQ ID NO: 30 - DNA, 8200 bp, Arabidopsis thaliana
aaaaaaatgaaaatattgtatttataagtttttgatagacaaacataagttttacaattttccaaggaaaaagtcatattttcctagtaaaaacctttcgggttttccaatttatttaccaaagataattggtctctgaaagaacaaagcaaaacctaagaaagctaaaaagacactcagcgaattgaatttgtaaaaaaataagagaaaaaatcttgatttcttctgcgatcttcggttctcgacgcatcatgtgttgaagattcttctatcttcctctgtacatactctctctctgcccaagtgttgttgaaccaaaaaggggtcagatttagggtttttggaagatttttgtggctggactggccctgcagcgatgtctacctcgtcgcaatcttttgtggctggacggcctgcatccatggcttccccttcgcaatcgcaccgcttttgtggtccctcagccaccgcttctggtggcggaagctttgacactttgaatcgtgtcatcgctgacctttgcagccgtggtaatcctaaggagggagctcctttagcgtttaggaaacacgtagaggaagcagttcgtgatcttagtggtgaagcttcctctaggttcatggagcaattatatgacaggattgctaatttaattgagagcactgatgtggcggaaaacatgggtgcactcagagccattgatgagttgacggagattggatttggtgagaatgctactaaggtttctagatttgcgggttacatgaggactgtgttcgagttgaagcgtgatcctgaaatcttggtgcttgctagtagagttttggggcaccttgctcgggcaggtggagcaatgacttctgatgaagtggagtttcagatgaaaacagcttttgattggcttcgcgtagacagggtggaatatcgtcgtttcgccgccgttttaatattaaaggagatggccgaaaatgcttctactgtctttaacgttcatgtccctgaatttgtggatgctatctgggttgcacttagggacccccagttgcaagtgcgagaacgagctgttgaagctttgcgtgcatgccttcgtgttattgagaaaagggagactcgatggcgagtgcagtggtactatcgaatgtttgaagctacacaggatgggttgggcagaaatgctccggttcacagtattcatggttctttacttgccgtgggggagctgttgaggaatacaggtgagttcatgatgtctaggtatagagaagttgccgaaattgtcctcagataccttgaacatcgtgatcgccttgttcgccttagcatcacctcgttactgcctcgcattgctcactttctccgtgaccggtttgtgacaaactatttaacgatatgcatgaatcatattcttactgtgttaagaataccggctgaaagagccagtgggttcatcgcccttggggaaatggctggtgctttggatggtgagcttatccattatttgccgacaattatgtctcatctgcgggatgcgattgctccacgtaaaggcagacctttgcttgaagctgtggcttgtgttggtaacatcgcaaaggcaatgggatccacagtggaaactcatgttcgagatcttttagatgttatgttttcatctagtctctcttccacacttgttgacgctcttgaccagataaccatcagcattccttctttgctgccaacagtacaagatcggcttctagattgcatttcgttggttctttcaaaatcccattattctcaagcaaagcctcctgttaccattgtccgaggtagtacagtgggcatggcaccacagtcttctgaccctagttgttcagctcaagttcaactagccctgcagactcttgctcgtttcaatttcaagggacatgatcttcttgaatttgctcgggagtcagttgttgtttatttggatgatgaggatgcagccacaagaaaagatgctgctttgtgttgttgcagactaattgcaaattctctttctggcatcacacaatttggctcgagcaggtcaacacgagcaggggggagacgcaggcgccttgtggaagagattgtggaaaagcttctcaggacagccgttgcagatgctgatgtaactgttcgcaaatctatattcgttgctttatttggcaaccaatgtttcgatgattatctagcacaggctgatagtttgactgccatttttgcttccttaaatgatgaggaccttgatgttcgagaatatgccatctcagttgctggaaggttatcggaaaaaaatccagcatacgtacttccagcacttcgtcgccatcttatacagttgttgacctatcttgagctgagtgcagataacaagtgcagggaagagagtgcaaagctccttggttgtttagttcgaaattgtgaacggctcattcttccatacgtagcccctgtccaaaaggcacttgttgcgagacttagtgaaggaactggagtgaatgctaacaataatattgtcactggagttctcgtaactgttggggatcttgcaagagtgggtggcttggcaatgagacaatatattccggagctgatgcctttaattgttgaagctttaatggatggagctgctgtagcaaaacgtgaggtggctgtttctactcttggtcaagttgttcaaagtacagggtatgttgtgactccatacaaggaatacccattgttgcttgggttactcttgaaattgctgaagggtgacttagtgtggtctaccagacgagaagtgctcaaggttcttggaattatgggcgctttggatcctcatgtgcataaacgtaaccaacaaagtttatcaggatcacatggtgaagttcctcgcggcactggtgattctggtcaacctattccatcaattgatgagttacctgtcgaactccggccgtcatttgctacatctgaggattattactcaacggttgctatcaactcgcttatgcgaattcttagagatgcatcacttcttagttaccacaaaagggttgttagatctctgatgatcattttcaagtcaatgggattgggatgcgtgccttacttgccgaaggttttacctgagctttttcacactgttcgaacatctgatgagaacctgaaggacttcattacgtggggtcttgggactcttgtttccattgttcgccagcacatacgcaagtatctgccagagctgctttcattagtctctgaactatggtcatccttcaccttgcccggtcccatacgcccatcacgtggtcttccggttctgcatctactggaacatctttgcttggcacttaatgatgaattcagaacttatcttccagtcatccttccatgtttcatccaagtattaggtgacgccgagcggtttaatgattacacctatgttcctgatattctccacacactcgaagtgtttggcggaactcttgatgagcacatgcatttactccttccggcacttattcgattgtttaaagtagatgctcctgtagctataagacgcgatgccatcaaaactttgacaagagtaatcccgtgtgttcaggttactggtcatatctccgctctcgtgcatcacttgaagctagtattagatgggaagaatgatgagttgcggaaagatgctgtcgatgcactatgctgtttggctcatgcacttggagaggacttcaccatattcattgaatcaattcacaagcttttattgaagcatcgattgcggcataaagaatttgaggaaattcatgctcgctggcggagacgtgaaccattgattgtagctacaactgcaacccaacaattaagtaggcgactgccagttgaggttatcagggatcctgtaattgagaatgagatcgatcctttcgaagaaggaactgacagaaaccatcaggttaatgatggtagactacggacagctggagaagcttctcaacgcagcaccaaagaagattgggaggaatggatgagacattttagtattgaattacttaaggagtctccctctccagcattaagaacttgtgcaaaacttgctcagttgcagccatttgtcgggagagagttgtttgctgctggctttgtcagttgctgggcacagctaaacgagtctagccaaaagcagttagttaggagcttggaaatggccttttcatctccaaatatccctccagaaattttagctacactactcaatttggcagagtttatggaacatgatgagaagcctcttcccattgatattcgtcttctgggggctcttgctgaaaagtgccgtgtttttgccaaagctctgcattataaagagatggaatttgaaggtccacgatccaagaggatggatgccaacccagttgctgttgtcgaggctcttatacacataaataatcagttacaccagcatgaggctgctgtcggtatactaacctatgctcaacaacatcttgatgtgcaattaaaagaatcatggtatgagaagctgcagcgctgggacgatgcactcaaggcgtacactttgaaagcatctcaaacaacaaatcctcatcttgtattagaagccacattaggacaaatgagatgtcttgctgcacttgcacgatgggaagagctcaacaatctctgcaaagagtactggagtcctgctgagccatctgcgcgtctggaaatggcaccaatggctgcacaagctgcatggaacatgggagagtgggatcaaatggccgaatatgtgtctcggctagatgatggtgatgaaacaaagcttcggggtttagcaagcccggtttctagtggcgatgggagcagtaatggcacattcttcagggctgttctgttagttcgaagggcaaagtacgacgaggcacgcgaatatgtggaaagagctagaaaatgtcttgccacagaacttgcagcgctggttttggagagctatgagcgtgcgtacagcaatatggttcgtgttcagcagctgtcagaactagaggaggtaattgaatattatacgctgcctgtgggaaatactattgccgaagaacggagagctctaattcgtaatatgtggactcagcggattcagggatctaagcgtaatgtggaggtgtggcaagcacttttggctgtccgggcacttgtgctacctcctacagaagatgtggaaacttggctcaagtttgcctcgctttgtcgaaagagtgggaggatcagtcaggcgaaatctactctactcaagctcttaccgtttgatccagaagtatcaccagaaaacatgcaatatcacggacctccacaagtgatgcttggatacttaaaataccaatggtcacttggagaggaacgtaagcgcaaagaggcatttaccaagctgcagattctaacgagagagctctcaagtgtgccacattctcaatctgacatactggctagcatggtatctagcaagggcgcaaatgttccacttcttgcacgtgtaaatctcaaactgggaacgtggcagtgggcactttcttccggtttgaatgatgggtctattcaagaaattcgtgatgcgtttgacaaatctacttgctatgctcctaaatgggctaaagcatggcacacatgggcattattcaatacagcagtgatgtcgcattacatttcaagaggtcaaattgcttcccagtacgttgtttctgcagtcactggatatttttattctatagcatgtgcagcaaatgccaaaggagttgatgatagtttacaggacatactgcgtcttctgacattgtggttcaaccatggagctacagctgatgtccaaaccgcattgaagacaggattcagtcatgtcaacattaacacatggcttgttgtgctacctcaaatcattgctaggatacattctaataatcgtgctgtcagggaactgattcagtctcttctcatccgcataggcgaaaaccacccacaggctctgatgtatccccttctcgttgcatgtaaatcaataagcaatcttcggagagctgcggctcaagaggtggttgataaagttcgccagcacagtggtgcactcgtggatcaggcgcaacttgtatcacatgaacttatcagggttgccatactttggcatgaaatgtggcatgaagcactagaagaagctagtcgcttgtattttggtgaacataacattgaaggcatgctgaaagtacttgaacccttacatgacatgctcgacgaaggtgtaaaaaaggacagtacgaccatacaggaaagagcatttatagaggcataccgtcacgaactaaaagaggcacatgaatgctgttgcaattacaagataactgggaaagatgctgaacttacacaggcttgggatctttactatcacgttttcaaacggattgacaaacagctagccagtctcacgacattggatttggaatctgtttctcctgagttgctgctgtgccgtgacttggagctagcagttcctggaacatatcgtgcagatgcccccgtcgtgactatatcatctttttcacgccaacttgttgttataacctctaaacaaagaccaaggaaattgactattcacggaaatgacggtgaggactacgccttcttgttgaagggacatgaagatttaaggcaagatgagcgtgttatgcagctttttggtttggtgaacactttgcttgagaattccagaaaaacagccgaaaaagatctttccattcaacgctattctgtaataccactatctcccaatagtggactcatcggatgggttccgaactgcgatacccttcaccatcttattcgagagcacagagatgcaagaaagatcattcttaatcaagaaaataagcatatgttgagttttgctccagactatgacaatctaccgcttatagcaaaggttgaagtatttgagtatgctctagaaaacacagagggaaatgatctatccagggttctctggttaaaaagtcgctcgtcagaagtttggctagaaagaagaacaaactatactagaagtttagcagttatgagtatggttggttatattcttgggttaggtgatcgacacccaagtaaccttatgcttcatagatacagtggaaagatcttgcatattgattttggagattgttttgaggcttctatgaatagagagaagtttcctgaaaaggttccattccgcctgacaagaatgcttgtcaaagcaatggaagtcagtggcattgaaggaaacttccgctcaacctgcgaaaacgttatgcaagttctcagaaccaataaagatagtgtaatggcaatgatggaagcgtttgtacatgatcctttaatcaattggcgtcttttcaatttcaatgaagtcccccaattagcactgctcggtaacaacaaccccaatgctcctgctgatgttgagcctgacgaagaagatgaagatcccgctgatatagatcttcctcagcctcaaaggagtactcgagagaaggagattcttcaggctgtaaatatgcttggagatgctaatgaagttttaaatgagcgtgccgtagttgttatggcacgtatgagtcataagcttacagggcgtgatttttcttcgtctgcaattccgagcaatcccattgctgatcataataacttgctcggaggagattctcatgaagtcgaacatggtttgtctgtgaaagttcaggttcaaaaactaatcaatcaagccacttcccatgagaatctctgtcaaaactatgttgggtggtgccctttctggtgagatgggtcatctgtacatttttaatgtaaataggctttttaattttcaactaatttgcatttatgtttgactaattcgataataaactatgttctttttaatgtaaataatttattagtttcatagtcatgtattaatacatgatgtagcgtggatgaataaatgggcaggtcaccttttttacttttctgaaatatacattctcatatcctcaaggtattttaatggaattgcgacaaaagaagaagaagaagaagatggtgtacaatgtacatgttttatgaactatataaagcaattggaatatgcatgttctttttaatgaaacatgtttccggagtttaagatggatttcataaaaatcaacataattttgtt

SEQ ID NO: 31 - DNA, 7926 bp, Arabidopsis thaliana
aaaaaaatgaaaatattgtatttataagtttttgatagacaaacataagttttacaattttccaaggaaaaagtcatattttcctagtaaaaacctttcgggttttccaatttatttaccaaagataattggtctctgaaagaacaaagcaaaacctaagaaagctaaaaagacactcagcgaattgaatttgtaaaaaaataagagaaaaaatcttgatttcttctgcgatcttcggttctcgacgcatcatgtgttgaagattcttctatcttcctctgtacatactctctctctgcccaagtgttgttgaaccaaaaaggggtcagatttagggtttttggaagatttttgtggctggactggccctgcagcgatgtctacctcgtcgcaatcttttgtggctggacggcctgcatccatggcttccccttcgcaatcgcaccgcttttgtggtccctcagccaccgcttctggtggcggaagctttgacactttgaatcgtgtcatcgctgacctttgcagccgtggtaatcctaaggagggagctcctttagcgtttaggaaacacgtagaggaagcagttcgtgatcttagtggtgaagcttcctctaggttcatggagcaattatatgacaggattgctaatttaattgagagcactgatgtggcggaaaacatgggtgcactcagagccattgatgagttgacggagattggatttggtgagaatgctactaaggtttctagatttgcgggttacatgaggactgtgttcgagttgaagcgtgatcctgaaatcttggtgcttgctagtagagttttggggcaccttgctcgggcaggtggagcaatgacttctgatgaagtggagtttcagatgaaaacagcttttgattggcttcgcgtagacagggtggaatatcgtcgtttcgccgccgttttaatattaaaggagatggccgaaaatgcttctactgtctttaacgttcatgtccctgaatttgtggatgctatctgggttgcacttagggacccccagttgcaagtgcgagaacgagctgttgaagctttgcgtgcatgccttcgtgttattgagaaaagggagactcgatggcgagtgcagtggtactatcgaatgtttgaagctacacaggatgggttgggcagaaatgctccggttcacagtattcatggttctttacttgccgtgggggagctgttgaggaatacaggtgagttcatgatgtctaggtatagagaagttgccgaaattgtcctcagataccttgaacatcgtgatcgccttgttcgccttagcatcacctcgttactgcctcgcattgctcactttctccgtgaccggtttgtgacaaactatttaacgatatgcatgaatcatattcttactgtgttaagaataccggctgaaagagccagtgggttcatcgcccttggggaaatggctggtgctttggatggtgagcttatccattatttgccgacaattatgtctcatctgcgggatgcgattgctccacgtaaaggcagacctttgcttgaagctgtggcttgtgttggtaacatcgcaaaggcaatgggatccacagtggaaactcatgttcgagatcttttagatgttatgttttcatctagtctctcttccacacttgttgacgctcttgaccagataaccatcagcattccttctttgctgccaacagtacaagatcggcttctagattgcatttcgttggttctttcaaaatcccattattctcaagcaaagcctcctgttaccattgtccgaggtagtacagtgggcatggcaccacagtcttctgaccctagttgttcagctcaagttcaactagccctgcagactcttgctcgtttcaatttcaagggacatgatcttcttgaatttgctcgggagtcagttgttgtttatttggatgatgaggatgcagccacaagaaaagatgctgctttgtgttgttgcagactaattgcaaattctctttctggcatcacacaatttggctcgagcaggtcaacacgagcaggggggagacgcaggcgccttgtggaagagattgtggaaaagcttctcaggacagccgttgcagatgctgatgtaactgttcgcaaatctatattcgttgctttatttggcaaccaatgtttcgatgattatctagcacaggctgatagtttgactgccatttttgcttccttaaatgatgaggaccttgatgttcgagaatatgccatctcagttgctggaaggttatcggaaaaaaatccagcatacgtacttccagcacttcgtcgccatcttatacagttgttgacctatcttgagctgagtgcagataacaagtgcagggaagagagtgcaaagctccttggttgtttagttcgaaattgtgaacggctcattcttccatacgtagcccctgtccaaaaggcacttgttgcgagacttagtgaaggaactggagtgaatgctaacaataatattgtcactggagttctcgtaactgttggggatcttgcaagagtgggtggcttggcaatgagacaatatattccggagctgatgcctttaattgttgaagctttaatggatggagctgctgtagcaaaacgtgaggtggctgtttctactcttggtcaagttgttcaaagtacagggtatgttgtgactccatacaaggaatacccattgttgcttgggttactcttgaaattgctgaagggtgacttagtgtggtctaccagacgagaagtgctcaaggttcttggaattatgggcgctttggatcctcatgtgcataaacgtaaccaacaaagtttatcaggatcacatggtgaagttcctcgcggcactggtgattctggtcaacctattccatcaattgatgagttacctgtcgaactccggccgtcatttgctacatctgaggattattactcaacggttgctatcaactcgcttatgcgaattcttagagatgcatcacttcttagttaccacaaaagggttgttagatctctgatgatcattttcaagtcaatgggattgggatgcgtgccttacttgccgaaggttttacctgagctttttcacactgttcgaacatctgatgagaacctgaaggacttcattacgtggggtcttgggactcttgtttccattgttcgccagcacatacgcaagtatctgccagagctgctttcattagtctctgaactatggtcatccttcaccttgcccggtcccatacgcccatcacgtggtcttccggttctgcatctactggaacatctttgcttggcacttaatgatgaattcagaacttatcttccagtcatccttccatgtttcatccaagtattaggtgacgccgagcggtttaatgattacacctatgttcctgatattctccacacactcgaagtgtttggcggaactcttgatgagcacatgcatttactccttccggcacttattcgattgtttaaagtagatgctcctgtagctataagacgcgatgccatcaaaactttgacaagagtaatcccgtgtgttcaggttactggtcatatctccgctctcgtgcatcacttgaagctagtattagatgggaagaatgatgagttgcggaaagatgctgtcgatgcactatgctgtttggctcatgcacttggagaggacttcaccatattcattgaatcaattcacaagcttttattgaagcatcgattgcggcataaagaatttgaggaaattcatgctcgctggcggagacgtgaaccattgattgtagctacaactgcaacccaacaattaagtaggcgactgccagttgaggttatcagggatcctgtaattgagaatgagatcgatcctttcgaagaaggaactgacagaaaccatcaggttaatgatggtagactacggacagctggagaagcttctcaacgcagcaccaaagaagattgggaggaatggatgagacattttagtattgaattacttaaggagtctccctctccagcattaagaacttgtgcaaaacttgctcagttgcagccatttgtcgggagagagttgtttgctgctggctttgtcagttgctgggcacagctaaacgagtctagccaaaagcagttagttaggagcttggaaatggccttttcatctccaaatatccctccagaaattttagctacactactcaatttggcagagtttatggaacatgatgagaagcctcttcccattgatattcgtcttctgggggctcttgctgaaaagtgccgtgtttttgccaaagctctgcattataaagagatggaatttgaaggtccacgatccaagaggatggatgccaacccagttgctgttgtcgaggctcttatacacataaataatcagttacaccagcatgaggctgctgtcggtatactaacctatgctcaacaacatcttgatgtgcaattaaaagaatcatggtatgagaagctgcagcgctgggacgatgcactcaaggcgtacactttgaaagcatctcaaacaacaaatcctcatcttgtattagaagccacattaggacaaatgagatgtcttgctgcacttgcacgatgggaagagctcaacaatctctgcaaagagtactggagtcctgctgagccatctgcgcgtctggaaatggcaccaatggctgcacaagctgcatggaacatgggagagtgggatcaaatggccgaatatgtgtctcggctagatgatggtgatgaaacaaagcttcggggtttagcaagcccggtttctagtggcgatgggagcagtaatggcacattcttcagggctgttctgttagttcgaagggcaaagtacgacgaggcacgcgaatatgtggaaagagctagaaaatgtcttgccacagaacttgcagcgctggttttggagagctatgagcgtgcgtacagcaatatggttcgtgttcagcagctgtcagaactagaggagcggattcagggatctaagcgtaatgtggaggtgtggcaagcacttttggctgtccgggcacttgtgctacctcctacagaagatgtggaaacttggctcaagtttgcctcgctttgtcgaaagagtgggaggatcagtcaggcgaaatctactctactcaagctcttaccgtttgatccagaagtatcaccagaaaacatgcaatatcacggacctccacaagtgatgcttggatacttaaaataccaatggtcacttggagaggaacgtaagcgcaaagaggcatttaccaagctgcagattctaacgagagagctctcaagtgtgccacattctcaatctgacatactggctagcatggtatctagcaagggcgcaaatgttccacttcttgcacgtgtaaatctcaaactgggaacgtggcagtgggcactttcttccggtttgaatgatgggtctattcaagaaattcgtgatgcgtttgacaaatctacttgctatgctcctaaatgggctaaagcatggcacacatgggcattattcaatacagcagtgatgtcgcattacatttcaagaggtcaaattgcttcccagtacgttgtttctgcagtcactggatatttttattctatagcatgtgcagcaaatgccaaaggagttgatgatagtttacaggacatactgcgtcttctgacattgtggttcaaccatggagctacagctgatgtccaaaccgcattgaagacaggattcagtcatgtcaacattaacacatggcttgttgtgctacctcaaatcattgctaggatacattctaataatcgtgctgtcagggaactgattcagtctcttctcatccgcataggcgaaaaccacccacaggctctgatgtatccccttctcgttgcatgtaaatcaataagcaatcttcggagagctgcggctcaagaggtggttgataaagttcgccagcacagtggtgcactcgtggatcaggcgcaacttgtatcacatgaacttatcagggttgccatactttggcatgaaatgtggcatgaagcactagaagaagctagtcgcttgtattttggtgaacataacattgaaggcatgctgaaagtacttgaacccttacatgacatgctcgacgaaggtgtaaaaaaggacagtacgaccatacaggaaagagcatttatagaggcataccgtcacgaactaaaagaggcacatgaatgctgttgcaattacaagataactgggaaagatgctgaacttacacaggcttgggatctttactatcacgttttcaaacggattgacaaacagctagccagtctcacgacattggatttggaatctgtttctcctgagttgctgctgtgccgtgacttggagctagcagttcctggaacatatcgtgcagatgcccccgtcgtgactatatcatctttttcacgccaacttgttgttataacctctaaacaaagaccaaggaaattgactattcacggaaatgacggtgaggactacgccttcttgttgaagggacatgaagatttaaggcaagatgagcgtgttatgcagctttttggtttggtgaacactttgcttgagaattccagaaaaacagccgaaaaagatctttccattcaacgctattctgtaataccactatctcccaatagtggactcatcggatgggttccgaactgcgatacccttcaccatcttattcgagagcacagagatgcaagaaagatcattcttaatcaagaaaataagcatatgttgagttttgctccagactatgacaatctaccgcttatagcaaaggttgaagtatttgagtatgctctagaaaacacagagggaaatgatctatccagggttctctggttaaaaagtcgctcgtcagaagtttggctagaaagaagaacaaactatactagaagtttagcagttatgagtatggttggttatattcttgggttaggtgatcgacacccaagtaaccttatgcttcatagatacagtggaaagatcttgcatattgattttggagattgttttgaggcttctatgaatagagagaagtttcctgaaaaggttccattccgcctgacaagaatgcttgtcaaagcaatggaagtcagtggcattgaaggaaacttccgctcaacctgcgaaaacgttatgcaagttctcagaaccaataaagatagtgtaatggcaatgatggaagcgtttgtacatgatcctttaatcaattggcgtcttttcaatttcaatgaagtcccccaattagcactgctcggtaacaacaaccccaatgctcctgctgatgttgagcctgacgaagaagatgaagatcccgctgatatagatcttcctcagcctcaaaggagtactcgagagaaggagattcttcaggctgtaaatatgcttggagatgctaatgaagttttaaatgagcgtgccgtagttgttatggcacgtatgagtcataagcttacagggcgtgatttttcttcgtctgcaattccgagcaatcccattgctgatcataataacttgctcggaggagattctcatgaagtcgaacatggtttgtctgtgaaagttcaggttcaaaaactaatcaatcaagccacttcccatgagaatctctgtcaaaactatgttgggtggtgccctttctggtgagatgggtcatctgtacatttttaatgtaaataggctttttaattttcaactaatttgcatttatgtttgactaattcgataataaactatgttctttttaatgtaaataatttattagtttcatagtcatgtattaatacatgatgtagcgtggatgaataaatgggcaggtcaccttttttact

SEQ ID NO: 32 - protein, 2481 aa, Arabidopsis thaliana
MSTSSQSFVAGRPASMASPSQSHRFCGPSATASGGGSFDTLNRVIADLCSRGNPKEGAPLAFRKHVEEAVRDLSGEASSRFMEQLYDRIANLIESTDVAENMGALRAIDELTEIGFGENATKVSRFAGYMRTVFELKRDPEILVLASRVLGHLARAGGAMTSDEVEFQMKTAFDWLRVDRVEYRRFAAVLILKEMAENASTVFNVHVPEFVDAIWVALRDPQLQVRERAVEALRACLRVIEKRETRWRVQWYYRMFEATQDGLGRNAPVHSIHGSLLAVGELLRNTGEFMMSRYREVAEIVLRYLEHRDRLVRLSITSLLPRIAHFLRDRFVTNYLTICMNHILTVLRIPAERASGFIALGEMAGALDGELIHYLPTIMSHLRDAIAPRKGRPLLEAVACVGNIAKAMGSTVETHVRDLLDVMFSSSLSSTLVDALDQITISIPSLLPTVQDRLLDCISLVLSKSHYSQAKPPVTIVRGSTVGMAPQSSDPSCSAQVQLALQTLARFNFKGHDLLEFARESVVVYLDDEDAATRKDAALCCCRLIANSLSGITQFGSSRSTRAGGRRRRLVEEIVEKLLRTAVADADVTVRKSIFVALFGNQCFDDYLAQADSLTAIFASLNDEDLDVREYAISVAGRLSEKNPAYVLPALRRHLIQLLTYLELSADNKCREESAKLLGCLVRNCERLILPYVAPVQKALVARLSEGTGVNANNNIVTGVLVTVGDLARVGGLAMRQYIPELMPLIVEALMDGAAVAKREVAVSTLGQVVQSTGYVVTPYKEYPLLLGLLLKLLKGDLVWSTRREVLKVLGIMGALDPHVHKRNQQSLSGSHGEVPRGTGDSGQPIPSIDELPVELRPSFATSEDYYSTVAINSLMRILRDASLLSYHKRVVRSLMIIFKSMGLGCVPYLPKVLPELFHTVRTSDENLKDFITWGLGTLVSIVRQHIRKYLPELLSLVSELWSSFTLPGPIRPSRGLPVLHLLEHLCLALNDEFRTYLPVILPCFIQVLGDAERFNDYTYVPDILHTLEVFGGTLDEHMHLLLPALIRLFKVDAPVAIRRDAIKTLTRVIPCVQVTGHISALVHHLKLVLDGKNDELRKDAVDALCCLAHALGEDFTIFIESIHKLLLKHRLRHKEFEEIHARWRRREPLIVATTATQQLSRRLPVEVIRDPVIENEIDPFEEGTDRNHQVNDGRLRTAGEASQRSTKEDWEEWMRHFSIELLKESPSPALRTCAKLAQLQPFVGRELFAAGFVSCWAQLNESSQKQLVRSLEMAFSSPNIPPEILATLLNLAEFMEHDEKPLPIDIRLLGALAEKCRVFAKALHYKEMEFEGPRSKRMDANPVAVVEALIHINNQLHQHEAAVGILTYAQQHLDVQLKESWYEKLQRWDDALKAYTLKASQTTNPHLVLEATLGQMRCLAALARWEELNNLCKEYWSPAEPSARLEMAPMAAQAAWNMGEWDQMAEYVSRLDDGDETKLRGLASPVSSGDGSSNGTFFRAVLLVRRAKYDEAREYVERARKCLATELAALVLESYERAYSNMVRVQQLSELEEVIEYYTLPVGNTIAEERRALIRNMWTQRIQGSKRNVEVWQALLAVRALVLPPTEDVETWLKFASLCRKSGRISQAKSTLLKLLPFDPEVSPENMQYHGPPQVMLGYLKYQWSLGEERKRKEAFTKLQILTRELSSVPHSQSDILASMVSSKGANVPLLARVNLKLGTWQWALSSGLNDGSIQEIRDAFDKSTCYAPKWAKAWHTWALFNTAVMSHYISRGQIASQYVVSAVTGYFYSIACAANAKGVDDSLQDILRLLTLWFNHGATADVQTALKTGFSHVNINTWLVVLPQIIARIHSNNRAVRELIQSLLIRIGENHPQALMYPLLVACKSISNLRRAAAQEVVDKVRQHSGALVDQAQLVSHELIRVAILWHEMWHEALEEASRLYFGEHNIEGMLKVLEPLHDMLDEGVKKDSTTIQERAFIEAYRHELKEAHECCCNYKITGKDAELTQAWDLYYHVFKRIDKQLASLTTLDLESVSPELLLCRDLELAVPGTYRADAPVVTISSFSRQLVVITSKQRPRKLTIHGNDGEDYAFLLKGHEDLRQDERVMQLFGLVNTLLENSRKTAEKDLSIQRYSVIPLSPNSGLIGWVPNCDTLHHLIREHRDARKIILNQENKHMLSFAPDYDNLPLIAKVEVFEYALENTEGNDLSRVLWLKSRSSEVWLERRTNYTRSLAVMSMVGYILGLGDRHPSNLMLHRYSGKILHIDFGDCFEASMNREKFPEKVPFRLTRMLVKAMEVSGIEGNFRSTCENVMQVLRTNKDSVMAMMEAFVHDPLINWRLFNFNEVPQLALLGNNNPNAPADVEPDEEDEDPADIDLPQPQRSTREKEILQAVNMLGDANEVLNERAVVVMARMSHKLTGRDFSSSAIPSNPIADHNNLLGGDSHEVEHGLSVKVQVQKLINQATSHENLCQNYVGWCPFW

SEQ ID NO: 33 - protein, 2454 aa, Arabidopsis thaliana
MSTSSQSFVAGRPASMASPSQSHRFCGPSATASGGGSFDTLNRVIADLCSRGNPKEGAPLAFRKHVEEAVRDLSGEASSRFMEQLYDRIANLIESTDVAENMGALRAIDELTEIGFGENATKVSRFAGYMRTVFELKRDPEILVLASRVLGHLARAGGAMTSDEVEFQMKTAFDWLRVDRVEYRRFAAVLILKEMAENASTVFNVHVPEFVDAIWVALRDPQLQVRERAVEALRACLRVIEKRETRWRVQWYYRMFEATQDGLGRNAPVHSIHGSLLAVGELLRNTGEFMMSRYREVAEIVLRYLEHRDRLVRLSITSLLPRIAHFLRDRFVTNYLTICMNHILTVLRIPAERASGFIALGEMAGALDGELIHYLPTIMSHLRDAIAPRKGRPLLEAVACVGNIAKAMGSTVETHVRDLLDVMFSSSLSSTLVDALDQITISIPSLLPTVQDRLLDCISLVLSKSHYSQAKPPVTIVRGSTVGMAPQSSDPSCSAQVQLALQTLARFNFKGHDLLEFARESVVVYLDDEDAATRKDAALCCCRLIANSLSGITQFGSSRSTRAGGRRRRLVEEIVEKLLRTAVADADVTVRKSIFVALFGNQCFDDYLAQADSLTAIFASLNDEDLDVREYAISVAGRLSEKNPAYVLPALRRHLIQLLTYLELSADNKCREESAKLLGCLVRNCERLILPYVAPVQKALVARLSEGTGVNANNNIVTGVLVTVGDLARVGGLAMRQYIPELMPLIVEALMDGAAVAKREVAVSTLGQVVQSTGYVVTPYKEYPLLLGLLLKLLKGDLVWSTRREVLKVLGIMGALDPHVHKRNQQSLSGSHGEVPRGTGDSGQPIPSIDELPVELRPSFATSEDYYSTVAINSLMRILRDASLLSYHKRVVRSLMIIFKSMGLGCVPYLPKVLPELFHTVRTSDENLKDFITWGLGTLVSIVRQHIRKYLPELLSLVSELWSSFTLPGPIRPSRGLPVLHLLEHLCLALNDEFRTYLPVILPCFIQVLGDAERFNDYTYVPDILHTLEVFGGTLDEHMHLLLPALIRLFKVDAPVAIRRDAIKTLTRVIPCVQVTGHISALVHHLKLVLDGKNDELRKDAVDALCCLAHALGEDFTIFIESIHKLLLKHRLRHKEFEEIHARWRRREPLIVATTATQQLSRRLPVEVIRDPVIENEIDPFEEGTDRNHQVNDGRLRTAGEASQRSTKEDWEEWMRHFSIELLKESPSPALRTCAKLAQLQPFVGRELFAAGFVSCWAQLNESSQKQLVRSLEMAFSSPNIPPEILATLLNLAEFMEHDEKPLPIDIRLLGALAEKCRVFAKALHYKEMEFEGPRSKRMDANPVAVVEALIHINNQLHQHEAAVGILTYAQQHLDVQLKESWYEKLQRWDDALKAYTLKASQTTNPHLVLEATLGQMRCLAALARWEELNNLCKEYWSPAEPSARLEMAPMAAQAAWNMGEWDQMAEYVSRLDDGDETKLRGLASPVSSGDGSSNGTFFRAVLLVRRAKYDEAREYVERARKCLATELAALVLESYERAYSNMVRVQQLSELEERIQGSKRNVEVWQALLAVRALVLPPTEDVETWLKFASLCRKSGRISQAKSTLLKLLPFDPEVSPENMQYHGPPQVMLGYLKYQWSLGEERKRKEAFTKLQILTRELSSVPHSQSDILASMVSSKGANVPLLARVNLKLGTWQWALSSGLNDGSIQEIRDAFDKSTCYAPKWAKAWHTWALFNTAVMSHYISRGQIASQYVVSAVTGYFYSIACAANAKGVDDSLQDILRLLTLWFNHGATADVQTALKTGFSHVNINTWLVVLPQIIARIHSNNRAVRELIQSLLIRIGENHPQALMYPLLVACKSISNLRRAAAQEVVDKVRQHSGALVDQAQLVSHELIRVAILWHEMWHEALEEASRLYFGEHNIEGMLKVLEPLHDMLDEGVKKDSTTIQERAFIEAYRHELKEAHECCCNYKITGKDAELTQAWDLYYHVFKRIDKQLASLTTLDLESVSPELLLCRDLELAVPGTYRADAPVVTISSFSRQLVVITSKQRPRKLTIHGNDGEDYAFLLKGHEDLRQDERVMQLFGLVNTLLENSRKTAEKDLSIQRYSVIPLSPNSGLIGWVPNCDTLHHLIREHRDARKIILNQENKHMLSFAPDYDNLPLIAKVEVFEYALENTEGNDLSRVLWLKSRSSEVWLERRTNYTRSLAVMSMVGYILGLGDRHPSNLMLHRYSGKILHIDFGDCFEASMNREKFPEKVPFRLTRMLVKAMEVSGIEGNFRSTCENVMQVLRTNKDSVMAMMEAFVHDPLINWRLFNFNEVPQLALLGNNNPNAPADVEPDEEDEDPADIDLPQPQRSTREKEILQAVNMLGDANEVLNERAVVVMARMSHKLTGRDFSSSAIPSNPIADHNNLLGGDSHEVEHGLSVKVQVQKLINQATSHENLCQNYVGWCPFW

SEQ ID NO: 34 - DNA, 5744 bp, Zea mays
agtatggatagcaagtgtagagaggaaagtgctagattattgggttgtttaattaggagctgcgcgcggctcattcttccttacattgctccagttcacaaggcgctagtgactagattgtgtgaaggaacgggaccaaatgctaataatgctcttgctgcgggagtgcttgccactgttggagaactggccaaagtgggtggctttgctatgaggcaatatcttcctgagctgatgcctgtagttgtggattctcttttagatggaggtgctgttagtaaaagggaagtggcagtgtcaactctgggacagattatccagagcacaggctatgttattgccccctataatgagtacccgccattgcttggcttactcttgaagttgcttaatggtgaattggaatggtcaactagactagaagtgctgaaggttttagggattatgggtgcattggaccctcacgcacacaagcgaaatcagcacaatctacctggtcagcatagagaggtcctacggccaacaatcgagaccgcacaacatattgtttccatggaagagttaccgactgactactggccttctttttcagcatccgaggactactattcaacagttgcaattagctccctcatgcgaattcttcgagatccttctctttcaagttatcaccaaatggtggttggctcccttatctttatttttaagtcaatgggcctcggctgtgttccatacttaccaaaggttcttcctgatttattccgtgctgttcgcatgtgcgaggatggtgctttaaaagagttcataacctggaaacttggaacattgatatctattgtccggcagcacatccgaaaatatttacaagacatactttccctcatctctgagctgtggacttcctcattcagcttggctgcaccaaatcggaccatacagggcccacagggttcaccggttcttcaccttgtcgagcagctatgcttagctttaaatgatgagttcagaatgtatttacttcacattctaccgagttgtatccaagtcttaggtgacgctgaacgttgcaatgattattactatgttcctgacatattacacacacttgaagtttttggcggaaatttggatgagcacatgcacttggttgctccggtgcttgttcgtttatttaaagtggagctggttgatatcaggcggcgtgcaattgttactttgactaatcttatacctaaggttcaggttggtactcatgtttcggctttagtgcatcatctgaagcttgtcttggatggcaacaatgatgatctgcggaaagatgctgcagaagcgctctgctgcctcgcacatgcccttggagaagactttactatcttcataccatcaatacgcaaaattcttgtgaagcaccacttgcggtacagaaaatgggatgagattgaaaatcggctactgaggcgagagctactcatcactgaaaacttgtctgtgcaaaagtacacacaatgtccacctgatgtcattagtgacccccttgatgattgtgatggtacaccttctgagatagctgatgaaacacagcgacaagcaagaagtcatcaagtcaatgatgtccggttgcggagtgccggtgaggcttctcaaaggagtactagggaagactgggctgaatggatgagacatttcagtattgcgcttctcaaagagtcaccatctccagctttacgcacctgtgcaaggctagctcagcttcagccttctgttggccgcgagttgtttgctgcaggttttgcaagttgctgggcccaaatgagtgaatcctcccaggaacagctagtgagaagtctcaagacagccttctcatctcagaacattcctcctgaaattcttgccacgctgctgaacttagcagaatttatggaacatgatgagaagccacttcctattgatacaagactgcttggtgcacttgctgagaagtgtcgagcatttgcaaaggcactccattataaagaaatggaatttgaagctgtgtgcaccaagaagatgggtgcaaatcctgttacagtggttgaatcccttattcatattaacaatcaactacagcagcatgaggcagctattggcatattgacttactcacagcaaaattcggaagttcaattgaaagaatcatggtatgaaaagttgcaccgttgggatgaggctcttaaagcatacaccgtgaaatcatctcaaacatctggtcctttacaaaacttggatgctacattaggtcgaatgaggtgtctagcagctttggctcggtgggaagatttaagtgcattgtgtagagagcaatggacgggtgcagaaccatctgctcgactggaaatggctccaatggctgcaaatgctgcttggcatatgggtgagtgggaccatatggcagactatgtttctcgcctggatgatgcagatgaaaataagctccgtatgttgggtaacgcaacagctagtggtgacggaagcagtaatggtgctttcttccgggcagttcttttagttcgttacaaaaagtatgatgacgctcggatgtatgttgagcgagctcggcggtgtttagctacagaacttgcagcactggtacttgagagttatgagcgagcgtataataacatggtgcgtgttcaacaactttcagaactggaagaggtgattgattactgcactcttcccatggaaagcccgattgctgacggacggagggaacttattcgcaatatgtggaatgaacggattaaaggaacaaaacggaatgtcgaggtgtggcaagccctacttgctgtcagggagttggttcttccccctaacgaagacagagacacctggataaagttcgctgaactttgctggaagaacggtcgtattagtcaggctagatctacgttagtcaaacttttacagtttgatcctgaatcttcccctgaattgacactgtatcatgcacatccacaagtagctctggcttatctaaaataccagtatgcagttggtgatgagcttaaaaggagggatgcattttctaaactgcaagagttgtctgtgcaggttgctaccaccatgggcaatttacctggaacatcagcaaaccatggcaccatgtcaaatgctggagtaccactcattgctcgtgtctacttgacacttggtagctggaagaaggcactatcacctgcattagatgacgattccattcaagaaattttgatttcttaccataatgccacgctaagtgcaaaggactgggggaaggcctggcacatatgggctttgttcaacacagaagtcatgtcacgctatactttccgaggccgaccagatattgctggaaaatatgttgttgcagcagtaactgggtatttttattctattgcttgtgcatctactacgaaaggggtcgatgatagcttgcaggatatccttcgtctgttaactctttggttcaaccatggggatacctcagaagttcaaacagcgttgcagaaaggtttttcccttgtcaagattgagatgtggctggttgtgctgccccagataattgctaggattcattcgaacaatagagtagttagagaactgatacaatctttgctagttcgaattggaaaggggcatccacaggctttgatgtatcctctcttggttgcctgcaaatcaataagtatattgagacaacgtgcagcgcaggaggtcgttgataagatccgccagcacagtggaggtcttgttgaccaggcacaacttgtgtcgaaggaactgatacgggtagcaattttgtggcatgaaatgtggcatgaggcactcgaggaagctagcaggatgtattttggtgagcacaatatcgaaggaatgcttgctgtacttgagccattgcatgcaatgcttgagaggggggatgagacaattaaagaaaatgccttcattcaggcttatgggcatgaattactggaagctcatgaatgctgtttgaaatatcgggctacaggagaggatgctgagctaactaaggcctgggatttgtattaccatgttttcagaagaatcgacaaacagcttccaagtcttacgaccctcgatctgcactctgtttcgcctgagctactcaaatgtcgaaagttggaacttgctgtgccaggaacttatgctgcagattcaccacttgtgacgattgagtattttgttccccaattgattgttataacgtccaaacaaaggccaagaaagctgacaattcatggaagtgatggcaatgattatgcattcttgcttaaaggccacgaagatttgcggcaagatgaacgagtaatgcagctttttggtttggtgaatactctcctagagaactcaaggaaaacatcagagaaggatttatcaatccaaagatatgctgttatacctttgtcacctaacagtggtttaattggatgggttccaaactgtgacacacttcatgctctgatccgtgaatacagagatgccaggaagattttcttgaatcaggagcacagacttatgttggcttttgcacccgattatgatcacttacccctcattgcaaaggtggaagtgtttcagcatgctttgcaaaatactgagggaaatgaccttgcgaaggttctgtggctgaagagtcgaacttcggaagtatggcttgagcgccgcacaaactacgctagaagcctggctgttatgagcatggttgggtatttgcttggtttaggagatcggcatccaagcaaccttatgttagatcgctatagtggaaaaatattacacatcgacttcggagattgctttgaggcttcaatgaatcgagaaaagttccctgaaaaagtaccattccgtttgactcgaatgcttgtgaaagctatggaagttagcggtattgagggtacattccgaacaacttgtgaaaatgtgatgcaagtccttcgcacaaacagagacagcgttatggccatgatggaggcatttgtacatgacccgttaatcaattggcgtctgttcaatttcaatgaggttcctcaagtgtcgaactatggtaatgttcatgctcacacggttgtcagtagtgaagaagcagtggctaaccgagagctcatgcaacctcagcgaggagcacgtgagagggaactgctacaggctgtcaatcaactcggtgatgccaatgaggttttgaatgagcgtgctgtagctgtgatggcacggatgagtgacaaactaacagggcgtgacttctcttctgggtcagctttggctggagcaggtagctctatccaacatggcagtgagcatttggcttcaggagatgcccgggatgcccaacctggtctctcagtgaaggttcaggttcagaagctcatactccaagcgacttcacacgaaaatttgtgccaaaactatgtcgggtggtgtccgttctggtgagctctcttggaaacagtagcagtttataacatgtaaatattgtgaataccgtgtgcatagaagtttcgtggtgacagtttgtatgtgcagctttgtaattagcagaacttcaagatgccttggaccatccttttgtcagtttcttagaccgtgtttagcagttcacccttatggccatccaaaacactgtttttgtactgtagattgtattgtttgtagattgtactgttcgcagggtggatttttgaatatgagtataagaatgtgtaagctgt

SEQ ID NO: 35 - protein, 1821 aa, Zea mays
MDSKCREESARLLGCLIRSCARLILPYIAPVHKALVTRLCEGTGPNANNALAAGVLATVGELAKVGGFAMRQYLPELMPVVVDSLLDGGAVSKREVAVSTLGQIIQSTGYVIAPYNEYPPLLGLLLKLLNGELEWSTRLEVLKVLGIMGALDPHAHKRNQHNLPGQHREVLRPTIETAQHIVSMEELPTDYWPSFSASEDYYSTVAISSLMRILRDPSLSSYHQMVVGSLIFIFKSMGLGCVPYLPKVLPDLFRAVRMCEDGALKEFITWKLGTLISIVRQHIRKYLQDILSLISELWTSSFSLAAPNRTIQGPQGSPVLHLVEQLCLALNDEFRMYLLHILPSCIQVLGDAERCNDYYYVPDILHTLEVFGGNLDEHMHLVAPVLVRLFKVELVDIRRRAIVTLTNLIPKVQVGTHVSALVHHLKLVLDGNNDDLRKDAAEALCCLAHALGEDFTIFIPSIRKILVKHHLRYRKWDEIENRLLRRELLITENLSVQKYTQCPPDVISDPLDDCDGTPSEIADETQRQARSHQVNDVRLRSAGEASQRSTREDWAEWMRHFSIALLKESPSPALRTCARLAQLQPSVGRELFAAGFASCWAQMSESSQEQLVRSLKTAFSSQNIPPEILATLLNLAEFMEHDEKPLPIDTRLLGALAEKCRAFAKALHYKEMEFEAVCTKKMGANPVTVVESLIHINNQLQQHEAAIGILTYSQQNSEVQLKESWYEKLHRWDEALKAYTVKSSQTSGPLQNLDATLGRMRCLAALARWEDLSALCREQWTGAEPSARLEMAPMAANAAWHMGEWDHMADYVSRLDDADENKLRMLGNATASGDGSSNGAFFRAVLLVRYKKYDDARMYVERARRCLATELAALVLESYERAYNNMVRVQQLSELEEVIDYCTLPMESPIADGRRELIRNMWNERIKGTKRNVEVWQALLAVRELVLPPNEDRDTWIKFAELCWKNGRISQARSTLVKLLQFDPESSPELTLYHAHPQVALAYLKYQYAVGDELKRRDAFSKLQELSVQVATTMGNLPGTSANHGTMSNAGVPLIARVYLTLGSWKKALSPALDDDSIQEILISYHNATLSAKDWGKAWHIWALFNTEVMSRYTFRGRPDIAGKYVVAAVTGYFYSIACASTTKGVDDSLQDILRLLTLWFNHGDTSEVQTALQKGFSLVKIEMWLVVLPQIIARIHSNNRVVRELIQSLLVRIGKGHPQALMYPLLVACKSISILRQRAAQEVVDKIRQHSGGLVDQAQLVSKELIRVAILWHEMWHEALEEASRMYFGEHNIEGMLAVLEPLHAMLERGDETIKENAFIQAYGHELLEAHECCLKYRATGEDAELTKAWDLYYHVFRRIDKQLPSLTTLDLHSVSPELLKCRKLELAVPGTYAADSPLVTIEYFVPQLIVITSKQRPRKLTIHGSDGNDYAFLLKGHEDLRQDERVMQLFGLVNTLLENSRKTSEKDLSIQRYAVIPLSPNSGLIGWVPNCDTLHALIREYRDARKIFLNQEHRLMLAFAPDYDHLPLIAKVEVFQHALQNTEGNDLAKVLWLKSRTSEVWLERRTNYARSLAVMSMVGYLLGLGDRHPSNLMLDRYSGKILHIDFGDCFEASMNREKFPEKVPFRLTRMLVKAMEVSGIEGTFRTTCENVMQVLRTNRDSVMAMMEAFVHDPLINWRLFNFNEVPQVSNYGNVHAHTVVSSEEAVANRELMQPQRGARERELLQAVNQLGDANEVLNERAVAVMARMSDKLTGRDFSSGSALAGAGSSIQHGSEHLASGDARDAQPGLSVKVQVQKLILQATSHENLCQNYVGWCPFW

SEQ ID NO: 36 - DNA, 27265 bp, Arabidopsis thaliana
ttaaaaaaaaccctgaacccattcctcagaaattcaaaatcaatttcatcgggtgacacttggggtactttgaactcccccactcactaccattgtcgtgattctcggattatgctctagtttgatttcgccatggttgcttcgagggatgtccatgagatcgtctccaagctctcgtcagataaagccaagactcgcgaagtaaactttttagttatcccttttaatcgttttttggggtttatggggaaaacggctgagaaatttcgactttggtgtatatttgtggcgtgttgtcttgatttcgttgtgcgtagtcgcaacgatgctttattgtttccttatactgcaatacggctcggtttctgtgataatttcgagtgggtttggtttgaaaaatgttgagatacttattgattaagctatgaccaattgaccagggcccccaagcattgactagaatttgtatctttctctgagtaatgtgctactaggttttttatgttgatctatatataattccattttaatgtttctcatgttgatgaatttcttacatattctgtatgtccaggatggtgtcaagttattgaatacatggctcgaaggggaaaggtcaattaccttttgtagatttctttcgcaaaacactgctaagctaaagttggacgagattccaaatggtaggtggtgataatttattcagttgatgctaatatacagtgcatcacgctttaaagttaatctagaacgttacttctccttgcagctgaaacgtggccctttttggttaaacttctccttcaatgtgtctcaatggaggtgtcaggtagtaagcgacggatgcccaagccaacttttgcaaagacacttcgcgttgtcgttcagcgaacagaagaaactaaatttcctggtgagaaatatttttttggtgaactagaaacatggtaacatgcttttaaatttttcatggaatcactttgtgcttgtaaagacgcttcactcgaagaggcagaagtatcaagtctcttggtcagaaacttcgtaatctgattttgaatgtttcctgtagttactatgtgttaacgtcacctcaaaagaggacattgttggaaaaaagttttatggaactggaataaatttgattttcatctcacagaaatgtatctttttgcttacactttgatggtgcatttactctgataaaaaagttcagcttttcccgtggttatgtaaccactctgttttaattctcaggtgtacaatttcctttgctatctatggctaaaaccctttttactcatgtacatgatatcttgagcaacacaccaagctttcagtcagagtatggtaccatactccgccatcttttggaaattaaggagtaccgttttcaaatgaggaagcgtacatattccagtgagttctcttcaattctatatccattaattgtcttgtcttgtcatgaatctgaagcgtatggtggtatgctggtgctgtgtattattttaatataatgtttctgcaaggtttggtgctgctatacatggaaagggctgagacagggttttgcgagaaaaacagtggtcaacatagccagaaggaggaagcttttcgctatattcttacgcttcagtcacttctagagaactcccctggtgattttcctgatgaccttcgagaagaaattgtgaacggcctcattcacatcttctcttctgtaaggtctgattttatttgttagtcagtctcactcagatctgtaccctcctttgcaaataatactaaaatttggtgtactaataatacttccagagatgaggggaagctttcacgcaagcttattgaatgtgtaaatacgttcttgctgaaggatggtcctaatttaggctctttgtcattggaaattcataatgcggttgaacaatttgtgttccgttgctggttaacaacccatgataaaaacctcaaggtttatttttttctttttctttttatggtagccctttgttaaacatgtaattttttaaatataattctttttcatggtcttaagttttttcttcttcttcttcttgttctgccttgtaggagatacttgtttcttatggaaggctacagttaaatttgacaagggattctagtgaatctagttctctagtggaacaacttttggacgtggttactcgtgaattggatcttggtagttcatcaagttctgcatcatggtacatcttttttgagtctcctctttcgagggataacttctttaaattctacacatctcgtgcagttatagatttctaattgaaaaaattatttaggggtgatacaacaaaggatgaaaagttaggggcactgagcagctatcagaatagcttggttgagctggctgcacatgtgttctaccgggtacctattttatatgcaaattactttgctctttgagtagctttacatggctcacaacatagttccaactcaggcgaccattttttatctattttcagcagtgtctagattttgtttaatctaacttcacccccattttaattgattcgagttatgatttctgaagcatttttgctctgcagaagtttgatctgtatactttgagaatattttttcaacacagtcaattgaacctcatcatagacatgcatgtttgctcacagccttctgtgtcctgaaatatgtgttttgtccgcttgtgtgtatatagggaatgtgttagagaaattttgctgacatttagaactttgacaggcatgtgtcaatacatctagaccatcactgtcagagaaacgagctcgtaggcaacatattgcgatgcgtatggtggatgcactaactgaaggaaaatggctatggtatgaattcctaatcagaatattacaagtgaatatccaatctgctgatgtcttctttgcgagagttgttttgtagatatatgtgtatccatatcataagaatgcatttgacgagtgtacactgtttgtttttgttaatgacacataatgctggagaataagtttggcgagaatagcacatccctttctaagaaaatctgtattatttctgtcagtctagatgctgtcttcgcactaattctaatatcgctgttccctgttttccgtagaatttttatttatatatgaatatgtggactgaagtacataagcttttcccaggtgtgctgcttttggttgtttagttcggaattattgtgctcgcatcaatatggatctccttatttactggtttgaagccatctgcacaaactttcagaggtaatttgggaacttagacttggatattacatggatctcgtttcttttcctctaagagaacagtagctaagttcttagaagtgtttttgtcaacaaggagtattgattttgcaccttctggtatggtgctcttttagaatgtccattgtaccaaaacctaagaagcagttgataggaccatacatttaaactaagtaagatggtgatagttactttttttcttatgtttcctatttttgtatgtctgtatatattatctccctttttatctatgtgacatactgtatatatatttttgttaatatgtgactacgctgcatagcctgcattaaccaagtaaacaagcaaacacaattctatgagtgcaatttcaggagtgtactgattcattacttttgatttcagtttagtttcttatattaccaacttctgacagtaatatgattcaacattatttcggatggtagtacctttggcagtttatggttttaaattctgtgaatattttttattgaaatatcctattctcatagcactgtaatagctgcaaaatgtagatgtggtgcttctcctagatatttcaatttcatactactagcatctgtctaacagggactgctttggttgacttaatcttgtaaatgacagacttctggaggatgccagtatgagacgttcttatgatggtctactatggactttgaggtatgtttatgatgctagttcaggtgtttactatgctaaatttgcagcaatttccttcatatatttgctaatattagttgctgttgaggtgtttgatacaaaaaatatgtaaatttatatgaggtatctagggatctttgttatacttaatttttcaagttgttaaattcgctgatcctatatttcagttagtttattgtgaaacttcaatttatttgaaggagtttgcaagggctctcctctggtttgtcacttccagatattactatggacatatcgaagtcatctgcttcttcaagcgaggtactttacatgcctttcctgcctttgtgtgtgtgagtctgtttctcatatgataggtgattggacaagttttgttcgcagaaacatgtattgctgagatttagagcggatttggtgttgttattaaaataaaataatacttgaatcccttgattatatcgtggagaagttgaggaattatattgtctctatgtttgcgtcttggcaaatggttttggtgtaaaatgaactgaacattaatagcctatccacatatagggtttttcttatgatgttaagctagctagactcaacttaatgttagataaattatgtgaccattttcaataaaaaccaggtggttaggcttttggatacattagctgattgatttctgggaatccttttgacttttggttttatgattgctgaaatggttttcatgccctattcatattcagctttgcattggaattcctgatttcattaatataatatcttattatgaacctgatttgctttgtagttagcttttggtttctaaactgtattatttgcagctagatcgtggttggcaatcgatttggagttctttaatccacgggctagcaacattcagcagcatgagtgtaattgtacgttgcacttatctacttatattctttcttgattcacacagtaaacaatttgttcaaaatctgttgcttcttacggtagaaactagagaaagtattaaaaaaaatcctgaccacttggtagcaaataaggttccacctatgacgtttgaacttgtgtataggtaccagccaactacttgaacttaagatttttgatctttctaacatttctttcgaacaatgaaaaagttttctttgggaatttttgtttgatcaaacgttagtggcttatttgttcggagtttcttttctagtcatttcccgtttaagttgagtttcaggttaactctgtaatagttttagttaaaaaagatactttaatggggatcaaggtcaaggggtttcttggttacccaatactatttaagggtggttggaagttgttttagctaaacagttttcggttactcgcaaattaagctgattagtagccacagatgcacgcacgtatggctgatgctacactattttaatgcaggttgatgctgtcttggtactccttggatcaattatttcaagtgtgagttttttaattaagttttatattttgttttaaagacttttatcctcttaatattattgtctcttcaatcagaaccacattaccgttaaaattctgcctcaagaagtttgggatcatcaattattcagacacataccctctgagtaagcctttcatactcaaaacttaataagctatgttgttcagctatttcctgaggtgtacacataggctagagcctcactttttctgaaaaaaataaaaaaaaagtttgtatatatcttattgttgtttttactcaataagattaatttgtgttcgactacctggttggctttaattaatagaggctgaatggctctactgttatctaaagaattatgactttttacccaggccggccttgtacttcattgcatgttacttttcacgtatgggttgccaggtaagaaggttctcactgtaattgtctggttttggtacattctatgttgactatttctcaacctttaaagtcttgaagagttgttgcatcgtcatggttttatcctatcactgatggttgaatttgtgcagggaaacctgcaagatgatttacatcttcgacgaaatcttcttagagcagtttgtgcccctctaagttggaaggtagttttaattttttcagaagtacacaagtatatttggcacatggatctcattaattaataatcatatttttggtctgatgttatgtgatacctcttactctcttactttccgtggaggaagtattgtcttggatctgaccaaacaaaatcgttagcctgaattgtttctactccaatatgaagattgtcaggcagtgaaatttgaccttttatgttattttctgccaactagttgttaagagctgctgcattctattttcacctgatatttgtgaactgaaaatcataagatatagtttgaagcctcatcaggttcactgagtgaagtaagcattgtagatttgtaagtctcgaatgatgtgtacctcattgtaccaaacgatcatattggaaatcctgcttgtggcttttacattcttaggttcgtttgactctagatgagagaatggtccagcttctaccagcagctgctttttccctatgtgctggtttcaaggtttcacttccattgcctaaggaacatcttccaacaccatctcaatgggatgtctgtgaacaggtgagtgatgtggtgaaggtgctggttatgtttgataatttttcatcttatgaaagaatcaagactgttactggaatttgtttttctttcttctgcagatagatgatgttgatcgagaaagaaattttggactctttgaatgctctgtggaggctctaacaagaatttgctcaaattctagcaaggtggaggatccttgatttcttttccgccttttcctgactcatttctccgctgacagtttttttgtttccttgtagttcagatctctggctgccaagttcctgacgtagtacaactacctctggtgttaagagatccattgcttcatgacatggatatctattttcttagcattataccggaggtcaaggagaaaggaccattgtctgacatctttatgggatgtgctctgttgtgtcattttatgcatggttcttacatcacaaggtttgttaacttgtcaacgagtaatattgttattgtcttatcagactttctctatcgaaagtgttcactcctttagaatgtgtatatagtttataacaagattttcatagatatcttgatggacggtgagcaccacttgtagatgcgtctttgttctgtttgtagtgtaatcatgttctttgcatgtagctgtcagagacaaagttgtgatttttttgggaatcttttttttttcacttttcagaggtttaagacaaaaatgattgatggttgtgaatatggctacaccctcgatgaactagcttaaattgtatctctttgagtgaacttttctttcagtcaactggattttcgttttcatttctcaggaagggtaaaggaagcagttcgttcttcttaaaggcatgccagtatttgttagaaggcctggatcatgctgttgaatcagtttcaaagagcctcaatgatcttcaaaggcgtggttccttagggtttggctcagattttaatgagaaaggttctataatagtttcattgaggtcctttactcaatctcctgtcttcagcaacagaagagaccaaaatctccttggcgctagttatgattttgtaattcattccttagagaaccttttgcggtcttttgctaaagtctatgaagaatatactgagcacgcatggaatacacattcagacactgtaccttctaaatccttagcacctgattccccagaagttggcaggattgtggatatggatttagatttagctgaagacactaaagagagggatattatagctgctgggggaaaagctgtacctggcctgcccgtttctatgggtaactggaagttgggcatggtatcgcttatctcatgtttttctccggtacttcagtttcctacatgggatgttctatataatctattggagaaggaatctgatcctaaggtatttcagcaatcttttttattataccaatatctcaaacttttgtggtgaccttatagctacaaactgcttacatgtgcaggtactggaaaatatactgtatcatctatgcaagctttcatgcttgacttctattccgaaggttgatgatttggtatggagtttaatttgttgatttaaatttgctgtgaaatattttgagaaagaaaatagagggtttttcatcaacatctcaaccacattttgttgtatttatgggtatttgcttcattattttactttaaggttattttcttggatggcatgcttagcacacaagtaaagatgaagcgtaactgtctcaatatagtcactgctctgcatgttttacttcatactttatcatcctcgaggagggattcctctggagtcgaaaaaaattgtggtttgtctttgaaagaagcagaaagttttcaggtactatctctcctgtttaaggtgattatttggttctttccagggatctgctttattaattgctcaggtaatgtgcaggtctttgtccaacttggcgcaatggtgaataaagtttctgaatttggtctcttgggatggtttgggcgtgtcaagctgatcaactgtatatgtgatcttgtcttacttaatcctcagactggtcaggtgcgtacttcccattttatcactctttcttcagacttgataagctgacatatgcaatattaatctcctccttatgttttagcttctctttgaactattttcatgaagcaaaaatgttcctgcctcaaggttgcatgacttttttttcttgtcaaattaccattggagttgaaaaaaaaaacagtttgttcagataagactattcctgttgtttggagatgaaaaattgaaatatattcttgcactcattacttgtagcgaaattgttcaagtaatggagaaaaattacagtgtgtttataataaacaagtaaacaggcagttttcctgttttaccattaccgctagtagttttctttttgaaatttcacattagccggttacagctaaatattctaattggttccttgtggaattcttattttatttagtctcttgttgtacagtgaattaagtttgtgttttaatacagacaatgattgagcgacttctgttgatgctaagtgactctgattatcgagtgaggtttgtcttggcaagacaaattgggattttattccagacgtgggatggccatgaggcattattccaagatatttggtaaagtttggttattcaaaattattattatcctgtggcttttttaagtagagtgttttcctactaagacaaactgttagatactcgttcgtacagatcttgtggcttaccaaaaaagaaaataagagaaagaagctgatctctgtctttgttgtgggtttctgttatatactcatttctacagattcttgtgatttacccaaaaagataagaaaaagaagaaaaagtcgtattctgtcgtttttgtgagcagagtatttgtttggcatgttctagtaaatttagtcatctctctggaaaaccttttcaaaattctgatacattattctttattgattctgagtcttatgacgagcatcattctgtaagatcagatgcttcacagggcttgttatcttttgaaattttaacttgcacttgagcctcgttatccgtttttattatgtttgattgtagtaccacattagtatttaatattttatttttattactgttttcagaattcgttgtcagattgatgtaactcattagttgtaaacttttcccatttccttttccagctccagctttggtattaaattggtaacctcctcaaaggagaaactagttaccgcaaaagatgttttggctgttggtcctcagcctcgccaaaaaatggagactgtcatcattactcttatgcacctcgcttatcacagtgagaacatagagttgcaggtaatatttttcattcattttcttttgagttcttagaatcattttgagtatgcaataagctaagcttgtgttaacatcgtattccaaactgggtgaaacgcaggctgtatttatgatgtgcgctgtttcagctaaagatccctgtcagaggtatttcctgctagtaattgttactgtcttttgtattagctgaaactttcttctacttatcttgccttcttcctactagggaattaatcattgccgcacttgacaatttatcagcacaactccattacccatctaggttcaaggtgttattgctgattcttgtatttttttttctctcttccacaactgcatgataaatgttcttcttgtttttacatttctgtgaatttcagcagacttacttgagattaatcccctctgaaccttgttaatgtgcctgctgacttaaactgctttgtgcagtacctggaagaactcttgggcccaatcctttttcactggattgcatctggtgtcagtttagctggccttattgaggtatgctgcaagttgatattctctgtttcatagatcaagcagttcttttctgtgatggttatattaccttttcacgaagttattgatgtgaactttgtttattggagtttcatttgttttatatatcaacttcaaacttgtattccagttaagtagattcaatatttttttgtttctcttgcaccatgggtttacaatattgtttgttggagtttcatttgttttatatatcaacttcaaacttgtattacagtaaagtagattcaatattttttttgtttctcttgcacatgggtttacaatattgtagatagggcacaatttgattacaaaatcaaagtaaattaccagtgaaagaatgaaatatcgacatgtgcttttggatatctagcaaagatgtcctaagtggcaatttgaagaatggaatgagtacctattagcattttatatcatctggtggttgctttgttgcagacaagtcagcttttcattccaaacgctgaaccgaaatatttcatccacttttgttcccactggctgcttccagctcttctattgcatgaagatcatactaacctcgactgggtagctaaggtaagggtgcttccttacatcttttatggacctaattgaacgttttggaaaactccaatctcagtttatggtgatgcttataggattttttaatgagatttataaacttttggttgctttgtcttctattcttgtatgggcaattaagatggtcagcgatttgagcttttccgatctttatttcactctctgtgtacaatttgcagatggctggccaaccagtggttgttttggtcaaagaaaattttgtgccaatattttcgatatgtatgggattgcactgtagtaaaacgtcagaatgtgataaaggtgcaatggtgcttcagaattcaatattgtatgtaggtgagaccagcgagaatgagagggacaagctgattaaacagaatatggtatgataccttgtaacatttaattcatgattccagcaatctgtcttttggtgttcgtggtggaaaatatccatgctagtctgatccgctagtccgaattaaccaaacattgacggtttaatttcattttgtcggagatttcaaaaataatatatatatttttgattataacgtattgaatatctaatgggcaccttgttttgttttcaggtgtctattgttagttttattttatcatgcgcttcgtcttcaccggaacctccagttcctactttttctcgtgacactatttcacttgcagttcaaacagttgtggatggttttctggaaaagtaaaatttcgtgctcactcaatgtagacttgttgttttagtttttcctttttataaggtcttacttgttttatgcagcactgattatcctaagaatgcggccatcactgacaggataaacatttttcgcccggatagagtgttcatggtaacattttaatttgccaaagctttttaatgaggtcacactgttcttgataatttgatactttagtcacaatattgttgttgttgtttcgcagttcattacagaaatgcactatagaatgtcagctgcatgccatcatcggcatacgcgtcatcatttggccgctcttgaagagcttacaattcttcttggtcatagagcgttagttccaagttccttaaagtgagcagaattctcaatttatctatttaatcttatttgttctgctactaaacatgagcttcatctgtaaattaaaatttgagtggcattgaagggtgaatatatatttttcgagcattaaaatgtactattatctttaattgtggtctctttcagctacatattcaatcttgttggacaatttatcggctatccctcactacaagaccagtgttgtagtatagcgtcctgtttgctggatttgttcaaaagcaatcctgccaaagaaattgttagtgtactaggtgaccaactccaagtaagtgttacttaatgttatcatttgggtcctcttctgaaataccaagggttttattactctagaaaatatggcttactttttctctatctgctggttttttagtttttggtttcaaagctggttacatgctgcattgatgctgaagcagataccaaaatttctggtgcgaagtcatctcaactggttaatttgctacacaagctagttgttagttcagactcttctcttaatgaagatatcagagtaggcgtcctacgtttaaagttgccttccttttgtcctaccagtgccaggaataatagagaaatatatatgttctgatttgttcatcgatttcaggacttggaaccactcccggatttaaaatatttccaagtcattcgtgaatcacacattaggatctgcgaagcatattctccgaggaatcatctgttgaaggttgaacactctacatttttaatttacatttttcttgaaattttatcactatccaactttttgtttctttcctgttccactatccaacagtgttctagaagatctaattatcttccaccgagattcctttccaggaggtatcgattctatcttcctgagttaaatcatcctacaatgtgcattaaggttatcctttgtggcatgatttgcgtaggatattagctgtagaattaagattacgtatggttcctatgattttactttggaagactgtagtttttctaattacacaaagcagcaacggtcaagggagaaaaagtttctcactattgtaaattcatttctggttattattaatttttatgtggttagtctgctcgatatctgagctactttgtttcattgtccgtggactatctagtttgtactcatgggtgaaatgtttgattctgtttctgtttttacaagttaatttagaaggcagagagtgttttgtctttcaattttatcgatatggcttttacctttatagaaacaaaactgaaagcactatcccaaaacatggctaatgaagtttatttctagagcctactaccctttagccctctactcttatcacactgctacaatttcatcaacttattatgccctttgcagtctccaagcactgcataacaagctcatagcttctgaagtttctcaagaagatacaaatggagaaactgcagaaacattttggcagtctgacgatgaaattgtaaatgctgtttggactcttgtccgagtgtctgcctctgatgaagccgatagtatgagacttttggtgtctgattttctttccagggtaactgtcattcgcttgtggtcagtatctcttgcaatttgaatatatggtcttattttctgttcttttactgtagattggtattagggacccccacactgttgttttccatcttcctgggaacttagtctccatgcatggtcttcaaggttttggccataatactggatcaaaagtcagatctttgactgagaacggcatatccgatgaaacccttatcacactgctaaattttctgaagaagtatcttttggatgactccgtaaagattattgatgtaacatcacaaacccttcgggtcagttttctaactttcttacctatccagatttgaccatccttattttttgtcgattgtttgattggtctcagttttttataatttacctgtagtaatttgactgtgcctctaaattccgtaatgtttggctatgatttaatttggcataattttttcttgattctgtaattagccttcaacttttgttctgctgcttcatgtttttcacactcctgctaactcatctttattccctgtcggatgtccgatctattgaaactttaataatctactatcatgcacatgaaagttatgaatctttctgtcttgtgagtcattatattttagtcaaaagatgtctaatccccttccccagttgtcatgcattttaggggttgtacttcatttcaaagatttattctgtaatatcttgtctcctgtttggaaaggataattgttcgcaagttttactttaatattttatttaagctatatagatgtccctctccttatttcagggaattctttcaaccgaaaggggccagcaagcattatcatcttttgattcatgtgagagagctttgattgaggtgagcttcttttctgcattagctttctggtcttatgctacttttcgtgggttgatatttctctgataattcgttaagtggagaattgttcccatgggcaggcattgtttttatcagtagaatgctgatgtctaaggatatataagatacgggtctttcagaaagttgtgcaaattgatttcaagaattatattgtgatatttgtgaatatgtaaatagtcagtgactacattcaaacaagtgatgtatattggatttcccattcttgttagggtatcctaagttcaaaactgctctgcctgtccagataatgtttttcttttggtaggtgcatggtaggggcgtgaaccttgacattgtggaaaagatcttattggatagccaaaagcagttcaaaggtaatctaattatcccatgaaccttaacattgtggcgaagatcttactatacagaatttgtgtgtaggaatctcatggttcgagttactaatcccacctcatagatctctttataatttatttctgtgaacctttcgtcttgctagatgctagaatttgttttaatgtcaagtttctttattgaaaactgaaaccgaatggtactaaatgacgggtatgtaaatcttgatgcaacctaaaacaaaaaatggaggatactgatgaagtcatcgaggcatatgaaatctttttggcttttggttgcaatcgtgaaaagttgtcctgattgatttttagactagaatgcctgggattattacagatttcagttaacgtagataagtatctctattacattctgcacatgacatgtccatgtctgtttaaacatattctattcatgttccactcttcctcttttttaaattactcaagaatggttcattttgggcctccagccgagaaattttcactggagacgcccgaagtgtggtccacagataataaaaactttgatagatggatttgtcagcttgtgtactgtatgatcgctttatgtgaggatgtcccaataaggtatctatttagttccagtttaccatagttatctatttaaagtatacaagtaaaatcttgcactgagtggatcattgttgctgctttgtttgacaggttatgccagaacatagcattgctgaaagctgaaatctctgagcttctattccctagtgttgttgttagtcttgcgggacggatagggatggatatcaatttacatgacttaattacgtcacaggtatctcatgaattttttggatataccaataatgcttcttttttctacttgcttgcattgtttcttctctggatatctctgtttttcgagtcaaatcctcttctcttgtgttccctatttctcggttctgtctttattagagatttacttactttaatgttgccatcttgacctcttctcgacttttgtttacaactgaaataattttctttatagaactatggttgttgtttttgttgatgagttaagcattatactcgtgatttgctcattctagttgtatactgtaaggtaaatcctctagcctggtggctgcgtcatgtttttccattagggtcgtgtatgttgcagaaacagataatttagtggtcactttggctaaagcttgtgatccccattggcaggtgaaagagcatatcttcactgattcaaacaagctaacaaaatcgaagcaagttatgttaaatactctgaatgaactgcggatgtgttatgtcctcgaaagatcgattttttctgggcaaacaaagagagaaaaggttagggtattgatttcatgactgacctgtttgctgtaatgtttttaagttcttgagaaaaatggttatcctgcatatcaataacagagaaaattatgctatccatgggagtgcttaaagacattctgctattctattttttctttacagtgaaatctgtatcatatgggattttcttctataaaagatccggataatatatgagagatgaccaaaactaacgtttggaatgctcttacagaattcaagatcttgttccacagctgctaagattagagatgtggaaagtggatcaaatggaatggcagcgtccataactactaattgggagaaggtgcatattagcttcaattaccatatgcattgttaggacgatcagcatttctgatccatgcaatgtctcatgtgtctggtgttgtcataaatcttcttctcaaagtgtttttggcttcctgctaaaattgcaactatgttttataggtgtgatatgtgataggtgtcacaacctttagttttgttgattattagatgccttgttatattttgtatttatgtcatatatgaagaattgattactttcaaatgatcaacatgaggtttagtaacttaattttatagtaaaaccatgcaaaaagaatttcaccctgtcaggttttgctacttctatgaatgtcattttatgttgatgttttaattcatttttctgttgaagtatttttgtatcatttctatggcactagttctctaatcagttatacctcttgtttcttttaaaatcttcataatacagaatgacttttgttgatcaggtttattggctttccattgattatcttgttgttgccggatcagcagtagtgagttacccctttcgtttaaattaacgaatttaagatagaagctcttaagttatttgtagtatataactcttctcgctttcccaggtttgtggtgcatatttgactgcttccatgtatgtggagtattggtgtgaggagaaatttggcaatctaagccttggagatcctgatttttcttatcatgataaggtactaaacaaggaatgcatgttatcgttcctctggtttccatcttaaccaactaactcattatgcttattgattaatgagtagtaactttatcgtcatctatgaaactttcattggatgcacttttacaaaattgcaaactcaggtctccatgtaaaaaaggggattggtaataagattttatttgcttggtttcatgcagcagagaaaatggttgtttgtgccgatttctaatctttccttttctttgttgttaacagttaccggatcatgttgagatacttgtgtctgcaataacaagaataaacgagcctgacagcttatatggggttatacattcaaataaggttcgttctgatactaaaattctttcctacagagtacatattcgatatctcatccacacacttggatcttgcctattggaaatggttgctagtctgtattctcctgaacttggtaacattaacctttttgttatctactctaggaatgttttgagacatctcccgtttcatttgattgccaaaatatattttcgacactgattagtaaaaaatgaagtagctaaatcatattgcagtatttgtttttaatttttttactggtttcttatatgtgaataatactttctgtttctgttacatggatgcaatctaaaagttgtctgctcaaataatcacattcgagcatgagggaaactggactagggcactcgagtattatgacttgcaagcacgttcacagaaaatggtggtgccaagtagcctttctgaaaatctagaggtggaacaatttcagccaacaactagtgcacggcattcggtttttggtgaaggggaggtccagagacaaccgttcaaaggactcattaggtcgttgcagcagacaggctgtatgcatgtcctggatttgtattgccgaggcttaacttcccgagaaggatgctttcagtatgatcccgagttcatcgaattgcaggtatgcatcctgatttctccttttttccaatacatggaagtctcatgtctaaataaggttgttggtaaaacataaatagtccatgggataaagaaacgatatgatgactcaaagatcttgaaggagtagcttagcaacaatatttaccagattagtagtttgtttcgttgcaatattggcccaaattctgttttaacaaataactcatcgaacaagactcagctgtggtacgtaagttgtgttgcttaggtgataattcagttgcaaattaacttcttgcttgcagtatgaggctgcatggcgagcaggaaaatgggatttttcattactttatccgcaaacacattgccaacctctgcaacatgcaaagaacaataattatcatgaaagtttgcactggtaacacatttctactcttatgtaccgatgctgctatacttagccattagatatctttccctgtctatatctcacgattgcaccaaatatgacatcttctcaacactgaatttgccgctggtcttaagacttttacttaaaagtaatatgttacagaggaattttagaatagagtagttgaagtctccatactttcctggtatctggcattgtttcttgggtcaagtcttagtatcaattttcagttatgattatttaagctttgaacagtcatcaatattacacatgagagtcactaacttccgccttaggcatgtctttttcgatgttttaacatgtttaatttctcagttgtttgagagcattgcaagaaggggattacgatgggttttatggaaaactgaaggatactaagaaggtaatgcatgatttcagtttattatcttagaattggaaggttgcaaccttcagtgtggtaaagaatatttgctttctctccttttcaggagcttgtgttgtccatttcccgtgcaagcgaagaaagcactgaatttatatactcaacagtagtgaaacttcaggtatggaattttaaaattgacattaacgtacaactcctttttccatcatgcttgtcatttgggtgcaaaattctactccttatttgttcatattcttgaatgtgataatggtctttctcttgccacaacccctttaaaagattagcacactctgggagtgccatacttaaggtcatcttgatcttaactagccaattacactgcaagagctgtcaagtttaacttatccaggtgtcgcaagttccaaaacttaactatgttgagatgttcacctttgaaaaaaagacttttccatctcaatatttcctcacaaaactatatctcatagactaaattttttcatatgtgaactttcaagctggggaatttatgaatgcaagctgcatgttcattaagatctaaggaaaaatgctgatgctaaagattccatgtctctttggaaaaacaatggttttgtcttttcccactttttgatttctcatgctttatcatgtctagattcttcatcatcttggactagtttgggatcttcgctggacgacatcttcgcatcaaagtgtgcatggctatctagtcaaacaaatggcatgcgtagaccccgtcattccaacaatggatcaggtattttctctgtaacttcgttttcaagtggtttgttcacttgcttctactgaatcgttgaaagcttcaagaatttatgttattagtataataagtaataagttggcaaaatgtcgaggctgcttagggacttttattagtattctttattagtcttgggagtgcacatatatgctcaaactacctagaagctaagtgagataatcttgttatctgagtccatgtttaattatgaaatacagttgtcttggctgaataaggattggaactctattattacgcaaactcagttgcacatgactttgttggagccatttatcgcatttaggcgagttcttctccaaatcttgggatgtgagaaatgtaccatgcaacatcttttgcagtctgcttcattacttcgcaaggtatgtataaagtgaaaagctacaatttcccttgtagtaaaatgcagaggaccaagacattatcttgttgctttcagggaacaaggttttctcatgcagctgcgtctctgcatgagttcaagtttctttgtgcaagaagtaatggacaacaacccgttccagactggcttggaaaggtaatttttttatgactcatcttgcatcttttgtggaatttgaatagcctgcttttttcttccttaattgtaaatatttatacggggacgttttccttattcacgtttatgaacgtgagaccaaagttacaactaaatttctgatcactcatttacccacgcctccttctgtcaacaaatagttgtcacctaggaattaaaatatttttaactgaacaaaggcatacaatggttgttttaatatctattagttactttgccacttagttcagaacagggcaatgtatctggtccactactagagatatgctttccagtaactttttttgtgtgtttctcagcttgaagaggcgaagctattacatgcccaagggcggcatgaagtttccattagtcttgcaaactacattttacataattatcaattaaaggaagaggcttcagatatatatcgtgtcattggaaagtggctagcagaaaccagatctagcaagtaaataaattgtcactttttattggttgaaagcagtttctatctatgcttgtaatgaacttctaagaatctcaactcggttcttttttttttttttttttttgcttctcttgaaaatagttctagaactattttagagaagtatctcaggcctgcagtttcgcttgctgaagaacagagttccaagatctgcaaaagattagtagatagacagagccaaacttggtttcatctggctcattatgcagatgctctatttaagagttatgaggaaagactctcctccagtgaatggcaagctgcactgcggctacgaaaacacaaggtcttatccaccttggttgctcaaattcacctctttaacattttctttttgtacttcgttttctgtgtgtaggatatgcctatttatttccttctaaatgagcaccaatcaatgactaatcccttcttttgctgtatcagtaatagttttaaacagcttcaactccaaaggttgttcttctggtgtgggtgaaactggaggtaactaactagtgtgtttaatttttcagacgaaagagttggaggtgcttattaaacggtttaagagttcaaagaaggcaagtattagtctacttccgtttgtttggtctctaaacaaatctcttatcaaagcatgatctgatggattggccggtctaggcatctctctcattttacttcatatttggtcttttactgtactaggcggagcaatctgactattcactgaagatccaagatctgcagaagcaactaacaatggataaagaagaagcagaaaaactgcaggttttttttattctgccttgataatctggcttatgtagaaaagtagtcatggttttcttgataggtgttatttactgatatgtgatctctctctctctttctcctcaattgcgtaggttgacagggataactttctgaaacttgcattggagggttataaacgttgtctggaaattggtgacaagtatgatgttcgagtggtacgttaatctatatttctgtgagatttgtgtataatgtaagatgtgaaacagtgtctggaattgatcctttatgacatgtcatgaagtgttaagttggcttttagagtcaaatatagaattccttaagaaactggttttaattgtaaggttacaacatctaatgaatctgcagatctatgtgttgctattgtgacttcatctctctctacaactaattagagttgggtttcattatattccttcgcatctatcaaggagtaactatggatatattagtggtcttcaatagtccaacctttcttcatttttcctgttttgggttgcggcggcttctaactgcttttcaacatttctcagtcgtgtttgtgtttgtatacttattggtcatatcaatctttctttggtttttttgggtacgtgatgaagtatatttgataatagcaccacatagattcatttaattccatgtgaatggtcgacctgtacttaggagtttaaagtttgtgactagcgcatacttatatatgccaggttatggtagagtgatctttattttcatataagttatacactttttatttgggaaattttgtcttacattatctcagaaagatatttaacgttttctctggccttttaaaaacatgtttgagattttagcagaaacgtggtgtattccattatattattaaattacttacggaacactgtttggagctaattcttctttctacaggtatttcggcaagtatccatgtggttcagtcttgcctcccagaaaaatgttattgataacatgttgagcaccattaaagaggtacttgactaatggtatcagattttatctgctatcgagaaggaattctttgattttccctccatttttcttgtttagtttataagcaatcttcatctccctaaacgttcttgcaggtccagtcctacaaatttataccccttgtttatcaaattgcttcaaggttgggcagttccaaagatgaatcaggatctaacagctttcaggtagaatacaattttacttggccatggtagaaaacttatgactatgatgctaatctctacgatttattacttgcagtctgcattggtttcgcttatcagaaaaatggccattgatcatccataccatacaatcttgcaggttctgaagtgttatccatctcttgtactctttatatttcttcttttctgtttggttaattggcatcggacttgctagaagtgcacacggtaaaatccttgagtgtcctatgatatcccgaatctgttgaaagaatggaaacacagtaaagtatgttgtgctgtatagcatgccatcgaaattacattattaccaagtgactttgtctatcttattcgaagtcaagtttctgaatactggatatatgtctcgtatttttctgttgcttttggttctagcttctggctttggcaaacggtgaccgtatcaaggataaccaacgcagtagaaattcttttgtggttgatatggataaaaagcttgcagcagagcatctcctgcaggatgtatcacattatcatgggcctatgattagacaagtaaaccttattttcacctaatcttatgcatcataaaccattttgcctggttacttatcagcaaatcctgattgtttttttcagatgaaacaactggtagatatctacatcaagcttgcagagcttgaaacaaggagagaggtctgatagttgagtttagaggaagtgttttgttatgctgtttgctgaacattttttgaaacatttgtggaactctttcctctgcaggataccaatagaaaggtagcactaccaagagagattcgtagtgtgaaacaactggaacttgtaagcatgccattgtttaatttattcatttgcattctcttatctaacttaatcataattattagcatgtaggacccgtgttactgctcaagatagaaaatttcttcgaaacttcaaaactttatgggtcatcttgctaggcactcctatacatacaatggagatattaatgcaactatagattgttcaaattctttagcaaatgttttcctgtgttttcacttgtctgctctcatggttcctgttttgagtctgttgcaactcctaacaagatcgatactccgttgcatgaattttggcgatatatagtcttttcgttgtttatttagttggaagagttaattggttagttgagcttgcaagcatattttccattatccttctagttcagatattcaatttcgctttttctctgtgcttctcaggtatgtgtcaaacattaatttattttgagtgtaggtacctgtggtgactgcaacaattcctgttgatcgtagctgccaatacaatgaagggtcattcccgtttttcagaggtttatcagattctgttacgtaagtccctgctcaattaatcttttgaaaatcaatataactataattttttgcatatctagtgtaaaagagcacttcatttaaaaccatgtcttttggatgatatgcagagtgatgaatggtataaatgctccaaaagtagttgaatgttttggttctgatggccaaaaatataagcaacttgcgaaatctggcaatgatgacctcagacaagatgctgtaagagtttcggaagttttacttgcaatgtctataatatgatacatcgtgtggcactactcacttgcaatgtctgtaatatgatacacggcactgctccctgtagtggcagcaaattgaaagtttgctgacttagctaagattacatataaaatggtctagttatgcaaaacgtgtaccattttgtttcaggttatggaacaattttttggcctcgtcaatacctttctacacaataaccgggacacttggaagagaagattagctgtgcgcacatacaaggtacgtctctgtatcagtctactagaggttttctgttttagagaaaatttgatccattcagtaagctctttataattcatatacttatatacatattctcaggttattccttttactccaagcgctggtgttcttgagtgggtcgatggcacaattccacttggagattatcttataggaaggttggtctagtagactagtatttacaataacatggtacaacaatctctcttccaaatcgtgacagttcaaaactatctgtttgcatatgaaatcacagctcaaggagtgagggtgctcacggtcgttatggcattggaaactggaaataccccaaatgccgagaacatatgtcgagtgtaagcttgtttcctttcacagttcttcttagttgtccatcactgacacctggtaatacacctcaactgatacgcggtgattgattggtggcttgtaggcgaaggacaagcgcaaagccttcgtggatgtctgcacaaacttcaggtttcattttttgtgaaacgttaatttaacttactccgtaagtaggttggtggctgaaaaatccatccccttttgcaggcctgtcatgcattactttttcctggaaaagtttctgcagcctgctgactggtttgtcaagaggcttgcttatacacgtagtgttgcagctagttcaatggaaagtatattcacttttgatgatatttatcctctttcagcttaagatagatgggaatttcaatttgtgtatactttagaatataaaacggaaaaaatcatttgaacccgactaaatggcatttgatttgctatcaggttgggtacatcgttggtcttggtgaccgacatgccatgaatattttaatcgatcaagctacagcagaagttgtccacatagatcttggagttgcttttgagcaaggattaatgctcaagactcctgaaagggtgtgctctctgcctctctgcctctcttccatctcttatctttgcatatttaattggttttcatgtgaatatataatctttgtacaattctcatttgttcatttttgttctgatctgataggttccgttcagactgacaagagacatcattgatggaatgggtatcacaggagtggaaggcgttttcaggagatgttgcgaagaaaccctgtctgtgatgcgaacaaataaagaggcactgcttacaattgtcgaagtaaccagatctgaaagttttaacttttgattttcttaaaatacaaaagtttttttgaatgcgtaatcaagatcgcttgttttgcaggtttttatacatgatcctctgtacaaatgggccttgtcccccttaaaggctttgcaaagacagaaggtacctcgtacccttatagttaagctgtaaatgtacaatgtaatgacctttgcaaaaaggttatgaaatggacttaactacggatttttgtttaaacaaatgcttccggtgctctttatttggatctatttcttcacgctaattattttgtgttccacttcattgtcttgatccagacgagattccaattcaatattaggatagtttatcctgttgaatacgttttgtttctcacacaaaggtcttgatccaggaaactgaagattatgatggcatgaacttggaagggttacaagaggagttcgagggaaacaaggatgcaacacgtgccttgatgcgtgtcaagcaaaaacttgatggctacgagggtggtgagatgagaagcatacatggccaggtaaagtttttgacatattaattaaagagtataacatttaaagcttgcattgttcttgccttcttggtgttactgagtgtatttgctcaacacttaattgttttgtaggcacagcaactaatacaagacgcaattgacacagatcgtttgtcccatatgttccctggctggggagcttggatgtaaccaaccttctatatgcttccaattttttgtctatgaatagagaaatctttatgtaaagttgaaaaatactcggctgccaaattttgtctagcttaggatgggaggagcaatctaaaaacggcttttgcgtggaacagaacaaatatgtgaagtaacaagctcaagcctataatatattactgcttttgtgca

SEQ ID NO: 37 - protein, 3013 aa, Arabidopsis thaliana
MVASRDVHEIVSKLSSDKAKTREDGVKLLNTWLEGERSITFCRFLSQNTAKLKLDEIPNAETWPFLVKLLLQCVSMEVSGSKRRMPKPTFAKTLRVVVQRTEETKFPGVQFPLLSMAKTLFTHVHDILSNTPSFQSEYGTILRHLLEIKEYRFQMRKRTYSSLVLLYMERAETGFCEKNSGQHSQKEEAFRYILTLQSLLENSPGDFPDDLREEIVNGLIHIFSSVRDEGKLSRKLIECVNTFLLKDGPNLGSLSLEIHNAVEQFVFRCWLTTHDKNLKEILVSYGRLQLNLTRDSSESSSLVEQLLDVVTRELDLGSSSSSASWGDTTKDEKLGALSSYQNSLVELAAHVFYRACVNTSRPSLSEKRARRQHIAMRMVDALTEGKWLWCAAFGCLVRNYCARINMDLLIYWFEAICTNFQRLLEDASMRRSYDGLLWTLRSLQGLSSGLSLPDITMDISKSSASSSELDRGWQSIWSSLIHGLATFSSMSVIVDAVLVLLGSIISSNHITVKILPQEVWDHQLFRHIPSEPALYFIACYFSRMGCQGNLQDDLHLRRNLLRAVCAPLSWKVRLTLDERMVQLLPAAAFSLCAGFKVSLPLPKEHLPTPSQWDVCEQIDDVDRERNFGLFECSVEALTRICSNSSKISGCQVPDVVQLPLVLRDPLLHDMDIYFLSIIPEVKEKGPLSDIFMGCALLCHFMHGSYITRKGKGSSSFFLKACQYLLEGLDHAVESVSKSLNDLQRRGSLGFGSDFNEKGSIIVSLRSFTQSPVFSNRRDQNLLGASYDFVIHSLENLLRSFAKVYEEYTEHAWNTHSDTVPSKSLAPDSPEVGRIVDMDLDLAEDTKERDIIAAGGKAVPGLPVSMGNWKLGMVSLISCFSPVLQFPTWDVLYNLLEKESDPKVLENILYHLCKLSCLTSIPKVDDLVIFLDGMLSTQVKMKRNCLNIVTALHVLLHTLSSSRRDSSGVEKNCGLSLKEAESFQVFVQLGAMVNKVSEFGLLGWFGRVKLINCICDLVLLNPQTGQTMIERLLLMLSDSDYRVRFVLARQIGILFQTWDGHEALFQDICSSFGIKLVTSSKEKLVTAKDVLAVGPQPRQKMETVIITLMHLAYHSENIELQAVFMMCAVSAKDPCQRELIIAALDNLSAQLHYPSRFKYLEELLGPILFHWIASGVSLAGLIETSQLFIPNAEPKYFIHFCSHWLLPALLLHEDHTNLDWVAKMAGQPVVVLVKENFVPIFSICMGLHCSKTSECDKGAMVLQNSILYVGETSENERDKLIKQNMVSIVSFILSCASSSPEPPVPTFSRDTISLAVQTVVDGFLENTDYPKNAAITDRINIFRPDRVFMFITEMHYRMSAACHHRHTRHHLAALEELTILLGHRALVPSSLNYIFNLVGQFIGYPSLQDQCCSIASCLLDLFKSNPAKEIVSVLGDQLQFLVSKLVTCCIDAEADTKISGAKSSQLVNLLHKLVVSSDSSLNEDIRDLEPLPDLKYFQVIRESHIRICEAYSPRNHLLKCSRRSNYLPPRFLSRSLQALHNKLIASEVSQEDTNGETAETFWQSDDEIVNAVWTLVRVSASDEADSMRLLVSDFLSRIGIRDPHTVVFHLPGNLVSMHGLQGFGHNTGSKVRSLTENGISDETLITLLNFLKKYLLDDSVKIIDVTSQTLRGILSTERGQQALSSFDSCERALIEVHGRGVNLDIVEKILLDSQKQFKAEKFSLETPEVWSTDNKNFDRWICQLVYCMIALCEDVPIRLCQNIALLKAEISELLFPSVVVSLAGRIGMDINLHDLITSQVKEHIFTDSNKLTKSKQVMLNTLNELRMCYVLERSIFSGQTKREKNSRSCSTAAKIRDVESGSNGMAASITTNWEKVYWLSIDYLVVAGSAVVCGAYLTASMYVEYWCEEKFGNLSLGDPDFSYHDKLPDHVEILVSAITRINEPDSLYGVIHSNKLSAQIITFEHEGNWTRALEYYDLQARSQKMVVPSSLSENLEVEQFQPTTSARHSVFGEGEVQRQPFKGLIRSLQQTGCMHVLDLYCRGLTSREGCFQYDPEFIELQYEAAWRAGKWDFSLLYPQTHCQPLQHAKNNNYHESLHCCLRALQEGDYDGFYGKLKDTKKELVLSISRASEESTEFIYSTVVKLQILHHLGLVWDLRWTTSSHQSVHGYLVKQMACVDPVIPTMDQLSWLNKDWNSIITQTQLHMTLLEPFIAFRRVLLQILGCEKCTMQHLLQSASLLRKGTRFSHAAASLHEFKFLCARSNGQQPVPDWLGKLEEAKLLHAQGRHEVSISLANYILHNYQLKEEASDIYRVIGKWLAETRSSNSRTILEKYLRPAVSLAEEQSSKICKRLVDRQSQTWFHLAHYADALFKSYEERLSSSEWQAALRLRKHKTKELEVLIKRFKSSKKAEQSDYSLKIQDLQKQLTMDKEEAEKLQVDRDNFLKLALEGYKRCLEIGDKYDVRVVFRQVSMWFSLASQKNVIDNMLSTIKEVQSYKFIPLVYQIASRLGSSKDESGSNSFQSALVSLIRKMAIDHPYHTILQLLALANGDRIKDNQRSRNSFVVDMDKKLAAEHLLQDVSHYHGPMIRQMKQLVDIYIKLAELETRREDTNRKVALPREIRSVKQLELVPVVTATIPVDRSCQYNEGSFPFFRGLSDSVTVMNGINAPKVVECFGSDGQKYKQLAKSGNDDLRQDAVMEQFFGLVNTFLHNNRDTWKRRLAVRTYKVIPFTPSAGVLEWVDGTIPLGDYLIGSSRSEGAHGRYGIGNWKYPKCREHMSSAKDKRKAFVDVCTNFRPVMHYFFLEKFLQPADWFVKRLAYTRSVAASSMVGYIVGLGDRHAMNILIDQATAEVVHIDLGVAFEQGLMLKTPERVPFRLTRDIIDGMGITGVEGVFRRCCEETLSVMRTNKEALLTIVEVFIHDPLYKWALSPLKALQRQKETEDYDGMNLEGLQEEFEGNKDATRALMRVKQKLDGYEGGEMRSIHGQAQQLIQDAIDTDRLSHMFPGWGAWM

SEQ ID NO: 38 - protein, 2989 aa, Arabidopsis thaliana
MVASRDVHEIVSKLSSDKAKTREDGVKLLNTWLEGERSITFCRFLSQNTAKLKLDEIPNAETWPFLVKLLLQCVSMEVSGSKRRMPKPTFAKTLRVVVQRTEETKFPGVQFPLLSMAKTLFTHVHDILSNTPSFQSEYGTILRHLLEIKEYRFQMRKRTYSSLVLLYMERAETGFCEKNSGQHSQKEEAFRYILTLQSLLENSPGDFPDDLREEIVNGLIHIFSSVRDEGKLSRKLIECVNTFLLKDGPNLGSLSLEIHNAVEQFVFRCWLTTHDKNLKEILVSYGRLQLNLTRDSSESSSLVEQLLDVVTRELDLGSSSSSASWGDTTKDEKLGALSSYQNSLVELAAHVFYRACVNTSRPSLSEKRARRQHIAMRMVDALTEGKWLWCAAFGCLVRNYCARINMDLLIYWFEAICTNFQRLLEDASMRRSYDGLLWTLRSLQGLSSGLSLPDITMDISKSSASSSELDRGWQSIWSSLIHGLATFSSMSVIVDAVLVLLGSIISSNHITVKILPQEVWDHQLFRHIPSEPALYFIACYFSRMGCQVRLTLDERMVQLLPAAAFSLCAGFKVSLPLPKEHLPTPSQWDVCEQIDDVDRERNFGLFECSVEALTRICSNSSKISGCQVPDVVQLPLVLRDPLLHDMDIYFLSIIPEVKEKGPLSDIFMGCALLCHFMHGSYITRKGKGSSSFFLKACQYLLEGLDHAVESVSKSLNDLQRRGSLGFGSDFNEKGSIIVSLRSFTQSPVFSNRRDQNLLGASYDFVIHSLENLLRSFAKVYEEYTEHAWNTHSDTVPSKSLAPDSPEVGRIVDMDLDLAEDTKERDIIAAGGKAVPGLPVSMGNWKLGMVSLISCFSPVLQFPTWDVLYNLLEKESDPKVLENILYHLCKLSCLTSIPKVDDLVIFLDGMLSTQVKMKRNCLNIVTALHVLLHTLSSSRRDSSGVEKNCGLSLKEAESFQVFVQLGAMVNKVSEFGLLGWFGRVKLINCICDLVLLNPQTGQTMIERLLLMLSDSDYRVRFVLARQIGILFQTWDGHEALFQDICSSFGIKLVTSSKEKLVTAKDVLAVGPQPRQKMETVIITLMHLAYHSENIELQAVFMMCAVSAKDPCQRELIIAALDNLSAQLHYPSRFKYLEELLGPILFHWIASGVSLAGLIETSQLFIPNAEPKYFIHFCSHWLLPALLLHEDHTNLDWVAKMAGQPVVVLVKENFVPIFSICMGLHCSKTSECDKGAMVLQNSILYVGETSENERDKLIKQNMVSIVSFILSCASSSPEPPVPTFSRDTISLAVQTVVDGFLENTDYPKNAAITDRINIFRPDRVFMFITEMHYRMSAACHHRHTRHHLAALEELTILLGHRALVPSSLNYIFNLVGQFIGYPSLQDQCCSIASCLLDLFKSNPAKEIVSVLGDQLQFLVSKLVTCCIDAEADTKISGAKSSQLVNLLHKLVVSSDSSLNEDIRDLEPLPDLKYFQVIRESHIRICEAYSPRNHLLKCSRRSNYLPPRFLSRSLQALHNKLIASEVSQEDTNGETAETFWQSDDEIVNAVWTLVRVSASDEADSMRLLVSDFLSRIGIRDPHTVVFHLPGNLVSMHGLQGFGHNTGSKVRSLTENGISDETLITLLNFLKKYLLDDSVKIIDVTSQTLRGILSTERGQQALSSFDSCERALIEVHGRGVNLDIVEKILLDSQKQFKAEKFSLETPEVWSTDNKNFDRWICQLVYCMIALCEDVPIRLCQNIALLKAEISELLFPSVVVSLAGRIGMDINLHDLITSQVKEHIFTDSNKLTKSKQVMLNTLNELRMCYVLERSIFSGQTKREKNSRSCSTAAKIRDVESGSNGMAASITTNWEKVYWLSIDYLVVAGSAVVCGAYLTASMYVEYWCEEKFGNLSLGDPDFSYHDKLPDHVEILVSAITRINEPDSLYGVIHSNKLSAQIITFEHEGNWTRALEYYDLQARSQKMVVPSSLSENLEVEQFQPTTSARHSVFGEGEVQRQPFKGLIRSLQQTGCMHVLDLYCRGLTSREGCFQYDPEFIELQYEAAWRAGKWDFSLLYPQTHCQPLQHAKNNNYHESLHCCLRALQEGDYDGFYGKLKDTKKELVLSISRASEESTEFIYSTVVKLQILHHLGLVWDLRWTTSSHQSVHGYLVKQMACVDPVIPTMDQLSWLNKDWNSIITQTQLHMTLLEPFIAFRRVLLQILGCEKCTMQHLLQSASLLRKGTRFSHAAASLHEFKFLCARSNGQQPVPDWLGKLEEAKLLHAQGRHEVSISLANYILHNYQLKEEASDIYRVIGKWLAETRSSNSRTILEKYLRPAVSLAEEQSSKICKRLVDRQSQTWFHLAHYADALFKSYEERLSSSEWQAALRLRKHKTKELEVLIKRFKSSKKAEQSDYSLKIQDLQKQLTMDKEEAEKLQVDRDNFLKLALEGYKRCLEIGDKYDVRVVFRQVSMWFSLASQKNVIDNMLSTIKEVQSYKFIPLVYQIASRLGSSKDESGSNSFQSALVSLIRKMAIDHPYHTILQLLALANGDRIKDNQRSRNSFVVDMDKKLAAEHLLQDVSHYHGPMIRQMKQLVDIYIKLAELETRREDTNRKVALPREIRSVKQLELVPVVTATIPVDRSCQYNEGSFPFFRGLSDSVTVMNGINAPKVVECFGSDGQKYKQLAKSGNDDLRQDAVMEQFFGLVNTFLHNNRDTWKRRLAVRTYKVIPFTPSAGVLEWVDGTIPLGDYLIGSSRSEGAHGRYGIGNWKYPKCREHMSSAKDKRKAFVDVCTNFRPVMHYFFLEKFLQPADWFVKRLAYTRSVAASSMVGYIVGLGDRHAMNILIDQATAEVVHIDLGVAFEQGLMLKTPERVPFRLTRDIIDGMGITGVEGVFRRCCEETLSVMRTNKEALLTIVEVFIHDPLYKWALSPLKALQRQKETEDYDGMNLEGLQEEFEGNKDATRALMRVKQKLDGYEGGEMRSIHGQAQQLIQDAIDTDRLSHMFPGWGAWM

SEQ ID NO: 39 - protein, 2598 aa, Arabidopsis thaliana
MVASRDVHEIVSKLSSDKAKTREDGVKLLNTWLEGERSITFCRFLSQNTAKLKLDEIPNAETWPFLVKLLLQCVSMEVSGSKRRMPKPTFAKTLRVVVQRTEETKFPGVQFPLLSMAKTLFTHVHDILSNTPSFQSEYGTILRHLLEIKEYRFQMRKRTYSSLVLLYMERAETGFCEKNSGQHSQKEEAFRYILTLQSLLENSPGDFPDDLREEIVNGLIHIFSSVRDEGKLSRKLIECVNTFLLKDGPNLGSLSLEIHNAVEQFVFRCWLTTHDKNLKEILVSYGRLQLNLTRDSSESSSLVEQLLDVVTRELDLGSSSSSASWGDTTKDEKLGALSSYQNSLVELAAHVFYRACVNTSRPSLSEKRARRQHIAMRMVDALTEGKWLWCAAFGCLVRNYCARINMDLLIYWFEAICTNFQRLLEDASMRRSYDGLLWTLRSLQGLSSGLSLPDITMDISKSSASSSELDRGWQSIWSSLIHGLATFSSMSVIVDAVLVLLGSIISSNHITVKILPQEVWDHQLFRHIPSEPALYFIACYFSRMGCQGNLQDDLHLRRNLLRAVCAPLSWKVRLTLDERMVQLLPAAAFSLCAGFKVSLPLPKEHLPTPSQWDVCEQIDDVDRERNFGLFECSVEALTRICSNSSKISGCQVPDVVQLPLVLRDPLLHDMDIYFLSIIPEVKEKGPLSDIFMGCALLCHFMHGSYITRKGKGSSSFFLKACQYLLEGLDHAVESVSKSLNDLQRRGSLGFGSDFNEKGSIIVSLRSFTQSPVFSNRRDQNLLGASYDFVIHSLENLLRSFAKVYEEYTEHAWNTHSDTVPSKSLAPDSPEVGRIVDMDLDLAEDTKERDIIAAGGKAVPGLPVSMGNWKLGMVSLISCFSPVLQFPTWDVLYNLLEKESDPKVLENILYHLCKLSCLTSIPKVDDLVIFLDGMLSTQVKMKRNCLNIVTALHVLLHTLSSSRRDSSGVEKNCGLSLKEAESFQVFVQLGAMVNKVSEFGLLGWFGRVKLINCICDLVLLNPQTGQTMIERLLLMLSDSDYRVRFVLARQIGILFQTWDGHEALFQDICSSFGIKLVTSSKEKLVTAKDVLAVGPQPRQKMETVIITLMHLAYHSENIELQAVFMMCAVSAKDPCQRELIIAALDNLSAQLHYPSRFKYLEELLGPILFHWIASGVSLAGLIETSQLFIPNAEPKYFIHFCSHWLLPALLLHEDHTNLDWVAKMAGQPVVVLVKENFVPIFSICMGLHCSKTSECDKGAMVLQNSILYVGETSENERDKLIKQNMVSIVSFILSCASSSPEPPVPTFSRDTISLAVQTVVDGFLENTDYPKNAAITDRINIFRPDRVFMFITEMHYRMSAACHHRHTRHHLAALEELTILLGHRALVPSSLNYIFNLVGQFIGYPSLQDQCCSIASCLLDLFKSNPAKEIVSVLGDQLQFLVSKLVTCCIDAEADTKISGAKSSQLVNLLHKLVVSSDSSLNEDIRDLEPLPDLKYFQVIRESHIRICEAYSPRNHLLKVEHSTFLIYIFLEILSLSNFLFLSCSTIQQCSRRSNYLPPRFLSRSLQALHNKLIASEVSQEDTNGETAETFWQSDDEIVNAVWTLVRVSASDEADSMRLLVSDFLSRIGIRDPHTVVFHLPGNLVSMHGLQGFGHNTGSKVRSLTENGISDETLITLLNFLKKYLLDDSVKIIDVTSQTLRGILSTERGQQALSSFDSCERALIEVHGRGVNLDIVEKILLDSQKQFKAEKFSLETPEVWSTDNKNFDRWICQLVYCMIALCEDVPIRLCQNIALLKAEISELLFPSVVVSLAGRIGMDINLHDLITSQVKEHIFTDSNKLTKSKQVMLNTLNELRMCYVLERSIFSGQTKREKNSRSCSTAAKIRDVESGSNGMAASITTNWEKVYWLSIDYLVVAGSAVVCGAYLTASMYVEYWCEEKFGNLSLGDPDFSYHDKLPDHVEILVSAITRINEPDSLYGVIHSNKLSAQIITFEHEGNWTRALEYYDLQARSQKMVVPSSLSENLEVEQFQPTTSARHSVFGEGEVQRQPFKGLIRSLQQTGCMHVLDLYCRGLTSREGCFQYDPEFIELQYEAAWRAGKWDFSLLYPQTHCQPLQHAKNNNYHESLHCCLRALQEGDYDGFYGKLKDTKKELVLSISRASEESTEFIYSTVVKLQILHHLGLVWDLRWTTSSHQSVHGYLVKQMACVDPVIPTMDQLSWLNKDWNSIITQTQLHMTLLEPFIAFRRVLLQILGCEKCTMQHLLQSASLLRKGTRFSHAAASLHEFKFLCARSNGQQPVPDWLGKLEEAKLLHAQGRHEVSISLANYILHNYQLKEEASDIYRVIGKWLAETRSSNSRTILEKYLRPAVSLAEEQSSKICKRLVDRQSQTWFHLAHYADALFKSYEERLSSSEWQAALRLRKHKTKELEVLIKRFKSSKKAEQSDYSLKIQDLQKQLTMDKEEAEKLQVDRDNFLKLALEGYKRCLEIGDKYDVRVVFRQVSMWFSLASQKNVIDNMLSTIKEVQSYKFIPLVYQIASRLGSSKDESGSNSFQSALVSLIRKMAIDHPYHTILQVLKCYPSLVLFIFLLFCLVNWHRTC

SEQ ID NO: 40 - DNA, 126606 bp, Zea mays
agtttctccacacgttcccaaaagcccccacaaacccctcgggcctcgtcccctccgcctctcgccgcgcggcttccctgatgcgctcgccccccgccgcggcctcccagccgaaaccctagctccgattcccataccgatggcggccgtggccactgcgcgcgacgtggaggaggtcgtccagaagcttcagtctgatcgggccagagtccgcgacgtgagaaccccttttatcactcagagacaagcaagcattgctgcctgcttccttcccgaccaattccttcttgcaccgcaggagggggtgaagctgctggggacatggctgcagggtgaccgcgctgcgtccttctgccgcctcctcggccgcaacaccgtcaggttcaagcccggccacgggaaccttaccggaggtcagttcgtgcatttcccatacccctcccacatgcatctcccttactcctctcgcatgcatttcccttgcccctcacatctcccatcattggctgatggtttcatttacaagtcacatctcacatcattggctgatggtttcacgttttttgttattgatggcgctgatgctatttgtttgcagccaccacgtggccactcctcgtcctggcgctcctcaactgcgtcaaggaggacatctcgggtaagaagcgtggcgccaccaagagcgctgccgcccggatgttccgcgttgctgtccagtgtgccgaagatgtcaagttatcaggttggctctgattcggatgacttttcgtattgaccagtaatcagtttgctgttgtcttgtgtgctatgctgtgctgtactgtgattgattgaacttcaaccagcccaacttttgatgataatctgagacgtgtgtatctgagtactgctagttgttaatacattctgatatttattttgttcacatctgcttgctcatgtgaagtttcaaatagcatgtagctttaaattgttttatcatctaacagcgtagttgatttttgcgcaaattacaagtgattttgacagtattggatcctgtatagtatttgacggagttgccttgagatgttccaatgtatatttttgctaacactgatccttgcctggtcttataatgatggcaatttcatagtcttcggcatttgttgggtttgtgtgattcagcactctggtatatattctcactttctagcaacatgtttcttttttacccagattcctgatgtgtgcacaatcaatttttcagttgctttgaagtggaatatactctgcatgacattacagaagtggtacctgtctttgcagggcattcactacatttgctctcagttgctaagcaactttttgttcatatttgggaggtcataaaagatggccctagccttcagttagagtacagcataatccttagacagcttctaaatgtgaaggagtaccgctatcagatgaaacctcgaacatatagcagtgagttttgtcatcagaggtgatgtattatcatattgtagcacccatttattttaatttccatgcattctcctcagattttgtatcactctacatgaagaaggttgctagtgcttttgatgcaaaattcagcaatcaggcgagctccaaggatgaatccttccgctgtacattgacacttcatgttctacttgaaaacccaccaagtgattaccctgatattatgcgggaggaggttcttaatggatttagtgcaatcttcttacatattaggcaagtactctggcccatgttcttgtgtcgctttcagatcccttgactttattatctccttttaacttcactgagttgtgaattcccatctctggtcgaaagtaggtttttgttttagaatggctgcagtgtaatttttataactttgaccatcattgtatttaaaatcacttagatttgccaatgagaattagattgacaactttatcataaaaagctatttaaattataatattttatttaagttcctggtgatatatatatatatatatatatatagaaaaggttatagtcaaagatgtgcattgtagactggtcatctaatggcaaataatatgatatgaaattgataaatcgattctgtaaaatcagggaggagggaaagctgactcgcaaacttatggaatgcattaacacctttttactgaaggatgggccaaatctgggatacaaatctgtgaagatccataatgcagttcaagagtttatattccgttgttggatgacaactcatgatcaggccttgaaggttctggtgatctgacttgcagttttgtaactttatatctttgttttgattacaaaaactcaattgcatttttcggtacatatttgaaatacgtttttgcttccagagtttgttcataacctacgtgaaagttcagctgaagattgccaggaatattccagagattttggaaaaacttattgatgtcatcattaaggaactagacaaaaatgttaacactggacctggacttctatggtaatgcaactgttgttatttaaagtattttatgtttttagttcttaactgatgaattcaattattgcaggtgtgaggcaccaagagatgagaaagctgtgtccttaaggtgtttccaagaggaatggatggatctctctgctactgttttttatctggtatttggatcctactcacctgcctattacacaacataccccctcctcccccattgcatgcatagccatgcaagcactcactaattagatttgccgatcttttactcaatgcaatatatccttgctccgttacaaataactttacaaacatttaggcctgcaaatgcacaacaaagacagcaaacagggagaaaaggatgaagaaagaacacattatgaaccttatcgttgatggcctttttagaggatctttgttttggtaagttaattatacataatgctcttggtaagttaattatctggtcatttatgacaactctacacttgtcccaggtttgaaatcctcttccgaggtatgactgataagtacattgcccccagagtcacctgttattaatctgtgccctttttcctgtacttctccatgcctttaaatgatgcttcctagtttgtgtggtgactggtgactatagcttcttctgacaagagtatgcagtttccttacatgtatctgtataagccaaatgtgatattattccctcagaaagctcattccagtctcttccctgaaaaaaatctcctgtcttctgtaaagtcttactatttccatgtgttgctgcccaaacccccctgagttaaatcttgggcgctattatactttaatacatgttgggagcctgatattcagtatttggggcatctttcatcatcccataaacacccttgcatcaaactgctgtctcttgctccatttgttctattattttgatttgatgaccccacaattgataaccttactgttacattgatttttatctagtagaacttactatcaataacatttttggtgcagaagtagtgagagttcacaacttttccattttatgcacacgctattagcttctctttacacttcttttctcccacaggagtggttctgtttgttttctgattcacaagtatggatatcatctagagaaatctttgctaattagttggtttgaagcaagttgcaaagctttgagaaggtaattctacatttctatttcttagtttttttatgcaatgatttcctaaagaaggtaaatggaatgcctactttggttcccgttgtctgatgcctccttgtcaagtacttctgttgttatattttatggtttcagaaatatagtgtacacaatacacatttagcttttgtcccttagttcagtaatcattggtacttcaacttttggaatacatagttaatgtcgatctgaatatcatattgtaattgtgcttaacagcgatacgacaataaggtaaaacaaatcacatggtgggtatcaatgttagtgtattgtttattgtgtcactgtaatgggctttaggccatgcacttggatatatattaatatatccatgcccaattagggttagggttttcactatccaacatggtatctagccacaaatcttttcctcttccctccctctccctcccttcctgctgagcgccgttgggcccttccccatgttcgacgcccctcccccccgttggtgggccaccatggcggctgggcaaccgtcgcccgtggccctttctcccccacccgcgcctccctcatcgcccaaacacgtgccatcgagcgtctcctcccatgcgttgccgttcttctcctcagcctccaccgcacacccctttgcgctgccgcccgcgttcatgcaacaccaccttgacgtctccatcgcccactccaccttagtgtctaccctcgccatcacaaaggccgtcgtggccgctgcacgcgatcgcggacacgttatggctctcgtctgggagcacgagcgtaccgcggctgatgctctcctctcacctgatgctctctcacctggctaaggccaagcttctcctccacggctcgtccaccgagccctctccggtggccccagtgctacccctcccactaagtacgaggctatggttatcgcgaacctccacgctcaggcgatcggtgtccagaacatctggtcactcgtctctatcgtcctcaaccccacatgccacatccaccacccactacgggcgaggcgagattgcgtcccttgagtagacgaagccttgacctgaattgcgcccatcagtctctgcagtttgtgctgatggtgattaccagccgagtttaggagtgttgggggtacccctaattatggtacccgacacgtagggacatggtgggctagtgaggggtcgctgcgtgtggaagaggctgtctcagacgaaaggctgctcgtctgagcaggggaggaaggaacagtttgatggaataagtcttgagcatctagaggacagcagtcacttttgactgtcctctgtagtccttgagcatctagaggacagcagtcgcttttgactgtcctctatagtcctttagcatctagaggacaacttaactgtcctctgtagtctctttagcatctagaggacaacagtcgctttttgactgtcctctgtagtctctttagcatctagaggacaatcctgttgtgtagtgtgtgtgagaaggtgtggtagtgcagcctctagggctataaatatgggtctccaacccttagatgggtatggcattgtgtagtgtttgaggaaataaacagaaaaattgccccaactcatagtgtcatcctcttgatgagagttagagtccctctacttacaattggtatcagagccaaactatcctgcagcctaaacatctcttgctcatctccttcccgcgcctctccccacactcagtcgacagcaagagctccaactgttccttcctctcctgctctgacgagcaacctttcgtttgagatagcctcttccacacgcaacgacccctcactagcccaccatgtctgtcacacccgggtttcggggcaccaagacccgggcgcgaacataatcaccaggtgtgctgggaccaagtctcacacatatgatgaatcatggcacaggatcgaatgtcacatctttactatataataggagttctgtacaaaataaatgaataaatacattataaggagacaacggtccagcaacccaaagttgactgggagacgacggcctagacctctcacgaactcgccacagcatcctccatgcgcctcatcctgcggtacctgttcttgacctgtgggggggggggtgagacaacaagagtgagctcacatacgttcatcgctcaacaagttgtggggaataatgtgcatgaactcgccaaaggtgagagctcacgtgaagtgtaaggcttacgaaagaggatggttagagctgagcattgcttttaaagttggtcaaaattttattagcaattactaagtataagtaaataccaacccaattaaatagtagaacaaaagtaacaacatcacctgcgatgcaatgcatatgacaaattgaatttaagttccataaattaatcatgtgagggtccgagccgctcatgaccgtgagcacggctagtataccagttttacactctgcagaggttgcgcatctttacccacaagtcatgttacccatctgccaagggatcgcgacttcccatacacctctaccgaggaggcgaggcagggtaacactacgaggcctttacaaagttccactagcttcagaaaacccgctacagtttataggaagctccaatgcaggaatcccttgcatgaccgccatcgcagcaaaatcatcccgagggcctccctacactgaccactcccctactgcccttgcccctttcgggtaaggtagtcctccactagctttcctaattaatcagccaagggcgtcccattatacccttgtggtagcactgttttcccgggtggtcgctccatgttccaattaacataatgatcttatcatgaacgataataacaacggataacaaaagtataatcatgagtaatgtatcttcatacccaaaaccgcatacagcactagcaagtactacccaaaaagttcagtggtaacaaggtataaagataatcaaactagggtaacctattgggtcccatcaaaattaacctatgcagatcattatgattaatcagaacatggctgggtaaaaagaagtgatcaagggcacaacttgcctgggacttgagattccaggtaccaggatgatcttcaggtgctcgtgacctcactgctaaacgtagcaatacagacaaacatggtataggcaaaattaacattacaccaaacataaggataaactgtgtgataataatctacgcgccgtaacgagatcgtagaaataagaaccactaaactcggagctacggttattaagttatgaatttctaaaatcatttagcacctagaatagattaattcaattgagcaattttaattcaagtttcatggttaaacaaaggtactaggtgataaacaatattaatacaaaattattgcaactagaatgaatcaatttggagttaaaatgaattaactatgaatttcctaagtttgggatattattttgcatttaaaaagaatttctgaattaaatctaataattttctgagttacttggactacgaccactatttaacagaaacccagggggttctgcgcaaaagacaccaagactgagaactcccacagtgtggactgcgggttgttttaacacaagtacatgggctcttatgcaattatccaaggccgaaggggtacgcagcgatcctggtcgcccagatctaattctacggcctagattagattgccctaatatcgaaacggtacgcaacatgaacccttggatctaaagtcaagggcggggatttaaagaagacgagatcactctggatccatccgatccgatcctacggcccggatttaacccttgcctaaacgattcgcgcgaccaatctaagccgtccgctatcgatccgatggccagcagactgtcttcttccttacgaccgaacaaggggtgcctccctgttcaacccctgcggcggtcatacccaatgaactgcccagattgccaactagtgtcctaaactctgtatggcacgaagctgaagggatagcgacgcaagtcgatttgatcttacccgaaacgatggtgccgatgttgctacccataatacaggcagtgcttgtggaggagacgaccacaacgctgcacacggtcggcacggctgcgcagacggaacagcaccgaggcggcgcctggaacgcgcaaagcccccagaccgcgctcctagcctggaaccttgccattgacaccggcggcggtggtaaacacgttaccacggcgggcgctgcaatgccgcaccaggttccattgagggcgtgtcatcctggatgaatgagaaggtagctccaccaccatttttataccccaggcatacggagtccgtgcaggagcagttggcaagatctcatgcggattttgctcctgtaaatgtggcgtggcatcatctacgaggtcctgctgatgcgacatccggcaagggaataaaataaaaggaaaaaagaagatgtgggctaacgctgaagtgagatgggcgggtagggggagataaggagtaggccggcgggagacacgccctggctgtgtccgtgagccaggtagcaagtaaggcttcggtgagctcttttttttaatattttcattttctattttagttttctagtttgattcacaaattctaaatttcaatttgagttcgagttttagcttcaaattaaatgcacaatcaaaatctccagcatgaatgcaacacataattttatttatttattttatttagacaaatgctcctatatatatatataattcgatatgaataaaccatgtagagtacttcaccatatatctatttaagaacatagttcaaatacagaacaaatatttactacttatttaattttaagaaactagttccattcataaatttataacggacactttaatttgatttctttcgaggaaaaaaaaatctactaaatccaaaatcaagattatagggtgttacaatgtccctacgctcggtcacttcgagtgcgcggcgccagcaggaagccgaggtcgccgcggcacaagaacgagagcgagcagcagcagcggctgcagcgacagcggcgagggcagcacggctggcggcagcggaactggcagcagcgagagcggaagtagaagcagtggaggcggcagatgctgcacgtgcggcggcagcagagctcgaggttctgcgcggcagtagagctggcagctctgcttctgtcgacgacaacaccgacgaagagctcaggctggcgagggaagcagcgcgagagcaggcggcacagtgggcagccgcgcacccccatgggggcgcgcgtggcggcaactcagataggtgccgacgcgctgacggtgctccgggcgagggtgcacgcggcggcagcctagacgggcgtagacgcgccggtggtgctcccggcggcggcgaccgagtcgacggagatcgcggcctctacaggcgacgcgactctccctccccggatcggtaccatggtcgccgcatggcccaggccattgtcagggacatcggtcccggcggtgggtggcctaccctcaccaagaccaactacgtcgagtgggccgcggtgatgagggtacggctccaggttcgccaaatgtgggaagcagttcggtacggcgacgtcgactaccacgaggatcggcgggcgttggatgccctcattgctgcagtcccgcccgagatgcagttttcgctttcccagaagcgaactgccaaggaggcctaggacgccatcgctgcgacccgcatcggcagcgaccgtgcccgcaagaccacactgcagacacttcgcaaggagtgggagaacctggccttcaagctaggtgaggatgttgatgactttgctctccgcctcaacactctgttgcagaagatggtgcagttcgacgacgacacctacgatgaggagagagctgttgagaagctcttccgttgcatccccgagaagtacaagcagattgctcgctcgatcgagtctttgctagacctctccacgatgacgatcgaagaggcgataggtcgtctcaaggtggtcgacagcgacgaaccacaggctccctctgggcctatcactatcggcgggaagctacatctcactcgggagcagtgggaggcctgccagggtgacaaaaagatgggggagtcctcctcgacacgaggccgcaaacgcggcaagcagcacaaggcgcgtggaggcgcccaggccggggcgcgaggacatgctgagggtggtgcacgtggaggtgcccaaggtggcgccgtcggcaacaagaagccggcacgagacgacggctgtcacaactgcggcaagcttggccactgggccagggactgtcggcagccacgacgtggtcaggccaacttcgcacaggcggaggcggaggccctgctcctggcacatgcaagcatcgagccatctccagcggcaccggccgcagcgacactcctccaccttgatgagtcgaaagcacgcgctttcctcgacgacggctccaacaaggacatgatcgaaggatggtgcctcgacaccggcaccactcatcacatgaccggccgacgggagttcttcaccaagcttgactctagcgttcgaggctccgtcaagtttggggacgcctccgacgtagagatcaagggcgccggctcagtcgtcttcaccgtcgcgtctggtgagcacaggctgctcaccggagtctactacatccccgcgttgaggaactcttatcatcagcttgggacagctagatgagaacggttcgcgcgtggaggtcgagcacagagtcatgaggatctgggatccctctcgtcgccttcttgccaaggtacgcaggagtccaaatcgactctacatcctcaatgtgaaggtggcacaaccttgctgccttgctgctcgtcgagacgaaggggcatggcagtggcacgagcgcttcgggcaccttaacttcgaggccctgaagcggctcagtgccaaggagatggtacgaggcctgccgtgccttgaccatgtggagcaattttgcgatgtctgtgttgacaaagcagagacgactcccctttccccaacagtcgagcttccgagccaaggagaggctcgagctcgtgcatggggacttgtgtggcccggtgacaccagccacaccaggaggacgacgatacttcttgctgctcgtcgacgatctctcccgctacatgtgggtgatgatccttggcagcaagggagaggctgcgaacgccatcaggcgtgtgcaggtcgctgcggaggcggagtgcggccgcaagttgcgcgtgctgcgcaccgacaacggcggcgaattcacggcggctgagttgacgcttatgactaggctctttggcttgacgagccgagtcaacttttcaggctcgtgagaggagcgagccgagccgagttcggctcgttacttgaccgagtcgggtttggctcgttacttgaccgagtcgcagtgagctgagcttggctcggctcgttttcacccctagctctgcctcttctctcgctttgagggacccccgcctcagccacttggtccctgttgggtggaggttgggaccagacgtctctcgctgactcgttcagcaccatggcgctgacaccacctcccaccttgccagattgggtggtcgactctggcgcatcctaccacattactcttgatgacgacacattatctcactcccatcctcatccatcccttccatcctctattattgcggggaacggttttgccctcccgattaccttagtaggtgacttagttcttcggggaccgttccatctaaaaaacgttcttgttgcttcccacaatattcagaatcttctttctatttgtcggttcaccaccaccaactcttgttccattgagtttgacccttttggtttatctatgaaggatttggctaccatgacccttctcgtcagttgtgatagctcggagccctgtgcacactccgactaccagcttcctccaccgtggctcgcctctggcggtgcaggggagaggagagtgccacgatacgtcggcggtggcgtatgggagatgggggagccacacaggcacaccaggctcggggagggagggcgcggcgggagcagggactgccgcccaggtgcgagagaggggagtgtggctggtcatggggagtatcgccggccagcggctggtggccgaaggaatggggaagctggccggcggctagggggagggaggaagagaagcttgataccatgatagaagtggagaccctaaccctaactagggtttgggatgctgtattaatagatatgggctaggcctaagcccattacacttaagacactcacacacacacatgtcgaacaagggggtagtaggttcctagaagttgcttattttactcgttttctttctttacggtgaagggttctctatgatggcttgtggtacttctgtgatgcaatatatatgattcattgacttctactattttcacacagtatcttgatccatgcaaatgccatacgttttcaggattcactactctggcttctcaggtttgtttggttctacaagtactacattttgcccctcctattttccccttttgttctctctctgtgtgggtaggggtgtgtagtggtggtgtttatttatggcttatagcatctgataccattctatgatgttcaatgtacaaggttatcacaatttactgttttttgaagtgtaaatggccatcaaataaaatgatatagagttaacaattacccactgcagtattttttttacttctttgtcctatcagtatagttgttaacttgtcattgttcttaacaggacattcaaggagttctccacagtgctcatgcttgacactagggataaagtgcaattttgtttaacaaaaggcgaggttaagttttcaaatccatatctttattttcacgaactttaggcaattttctgcttaccttattttctcaaagtaaaccattaaccaactggctccaggatacagaagatctgtatctatgttacgccctgccttaatcacttactgattactataagcatgccgtagaaaagtttgggctcatttttttacgttgtaaatttccagagggactgagagcattcagaaagtgctgaagtggtaattttctgggaatacccttcaagtgataacaagactctacacaactttatgagatagatgtggcattcacttattgttaagttttattgcgaaagggcctctagctgagttgattaggtggcttgagtagcacttttcaggtcctgagttgagttcgactccctgtgggagggaatttcaggctggggttatttttttcttgtttgccccatgccaaagcacagatctaaggctcggccccggtcgtggtcggtctcgcatggggtagatgctgctgtgtatggatgagataggggttcatagttttttcgacctacgtgaggtcttctttttaatacaatacctggggcaggtcaagttttttgtattgtgaagtttcatttctagaagtgtagtgaaaactttcaactacggttctcgggaggactaatgcaaggttattaaaacgataaaacgttggaacgctcgtgggtgaaattttgacttttaaacgtttaaactttgtttaaacgtagttttaaacaacataggaaaaacaccaatacatcataatttcagacaataatatgaagttaaataccaaaacagagatgacgcctggtcaaggatgccttgcctgatctcaattggttggctgatctgagaggggctatttctgttgcagcccttgctaatctcatggacctttgtgacttactcgaggggatggttctgcagccggatgttcctgatgtgcatacctggaggtttagtgaatcgggtgattactcggctagttcagcttacagggctttgcttcttggctctgttagctttgagcctgctgaacgcatttggaaatcctgggctccaggaaagtgtaaattcttcctctggcttgtggagcacgatagatgttggacggctgacagacttgctaagcgtggcctggatcacccagtgtcctgccctttatgcgaccagatggaagaaactatcaaccatttgctggttcagtgcagttttgcaaaacagttttggttcagccttctgcggtcgggtggtttccaggagctctgcccttcccatgatgacgtctgttttgaaacctggtggaggaatagtgctgccagggtgggcatgcctttatccaagggattcaattctcttgtcattttgggtgcatggactttgtggaagcatagaaataggtgtgtttttgataactgtaaccctagcgctgcggtggtgttggcagctgcaagggaggagttgatgggttggcgtatggctggagccaaagcgctctctttctttcatttagaagaggtgtcttaggtgtcttagttgtttggggtgtgttttttggttttggtttgccaaatgtaattctccccattttattcttcttcttaatacaaaaatacgcagctctcctgcgtattcaagaaaaaaaaaagtggcttaccaaaacttcacccatgagctggattgaaccccaaaagtaactaatagactgggcccaaaagtagctaatggtctaaaatgcataaaacactgcgttttacagtttagaacgccaaaacgctaaaacgtggtttcaacctctaattagagttttgacgtttaaacgtagttttaataacactggactaatgattacattagaggtgctacttttgaagtttaagtgactgcctgatacattttgagtcacatgcaccaaccaggtcactcacactccagctatctatgtacccctttgcctttgattccagatctagctaaaagaatgattttggttgcttggcaccacgccatcaagactatggagaattttgaaggaacctattattcttggacagtcagcagacatagctttagtctgtatatacatgttgtgaatgggactagttctttattatataagaaaatactgctttccaactggttcattttaaattttggataaccatagtggctctagtttaacataattactcataaaaacaaattgtttcctgtttttttttactgttttctatattttgggtgcactcagtattgcagccacatcaagcagtactgagcaggctgtttgcttatagtttttatcatgttgaattttgtacctcaatgcttttcctaatcaagtcttggcatttttgtaatccatcatgaacttaaagttaaagttgatgttgtcatccaataagttacctgtttattgcagatgtcaattgttgaagattgttggcaagccatatggaattcccttgttcacgcatttccgttgttaagcagcatagatctagttgtgagcaccaataaattacactatatggcctttttttatgttgttgcattgcttttttttttctgtcgtatcattactcgttctaatgaaatggtatccaactattggttggatagtgttttttgaatattaatgaaacacttataaattaaattggccattaaagaaaagagttatctgctctatttacatcttccagtatctccatttttcgggattttagtctctcaaattgaatgatgtatttcccagttattctttactaattgcttgcattatgcttatggtatcttatgaactagtgaaatgtcaccataattgctagaatacaattaaagttttcactgaatctatgttctatagattggaattcagaacttcattctgaaagtttggcagtacttttatcactgtaaacttgatctggagctgcgatctcaacacgatttatccatctcccgtaatatatatttttggaaaggacaagtcaggactgcaaatattattagtatcttaatcaattttttggaagtgcttatttgacatgacatttgccaaattagatgatttgaaagctgtttatataccatcttacaaagataatcttaactcattacattatgtgtcacctatctagtaccctttgatcgtgtaatgttgtgcacttttgtaggctgattcagctctgattttgctgggtggaatgatcatgcgggtgggtttcccactctcagttcagtcagttacctactttccatccaggatgagctctaactattcctgtgagtaacttatagctaccactaggtgtttctaatgtttttttcctcttcttccaggaccaagttcatacatcatttctatcagaagatacatggaacctgcaaatatttaaaaaatttccatcgccgtatgccttcttcctccttttgtaattgttggtttaaaaatggactgtgtttctacaatagctctatttttgttggaacttccacttcttttcttacctactcgttgattgagtttgttggttcttttcttatgaaattggtagggctgaaccctactgtaatatgagagataacaatgatgttgaaatacagcagagttcaatggacaagccagaggttctaaacataaataatctggcaaaaataagttgcagatgtagataatatcttaccattatcttaggatgatatatgcagtagatctttaattggagttgtataccatttgtaacctaggtacttgaataattggggtttactgtggcatcaatatttttaagctattttatttctgctcatgaccaaatggtccatataatatatccttatgtttcttatgaggagtagaaaagggcgggtctggtgcagcggtagagcctaccgtctgtaaccggaaggtcccgggttcgagccccagcctctgcatattatgcgggtaaggcttggcgcttaaagatacccttccccagaccccgcacagtgcgggaagcctacggcactgggtacgccctttcttctgaggagtagaagtttttttgtgtggcagttgtacatggcatacaggctgcacctatttttagttttctaggtacgccctttcttctgaggagtagaagtttctttgtgtggcagttgtacatggcatacaggctgcacctatttttagttttctagatgattacaggcagaaaatgtagcagaaagttccacttcttgaatgctactggcttctttactgaaacctctaaatgactgctttatgtagctgtgagtttatggaaaagttccaccaattagttcagtaattcacattgttttggacctgataaactgcactgcaattggtgagaaaattgctgaacatattataagatataaattttgtgaccattagtttagagaaacagttttgtgagattacttgttgtctgcaacggtagtaagtcctttgagtgttgtgctgtaaagatattgccttatgtaggactgtaggttattgaattacttatgtagttatgtttcataaagattattatttatgttttgtaaggattattcgaaatagccaaggggtatgtgtatctactgagtccggtttatcattggattgagtcccaaacctattcaaagctgtaccaaaacgaatagcaaaaagacagacagtggcccaagcaattcagaaacaccacaactcttgtgtgtttaacaacgatacaccaaatatccaggaggtcttgagggctgtcagcgcagaaggcattctttggtgtcgggcaggagcaaaaaagctccaggagcttctcaacagagcactggtcatggagttttaggtgtcccctttggcgcattagttttaggcaccttaagggtgggtgtcgagtctttgttttttaagttgggtctttctcaacttgttttgttacttttcctttctaccttaatgaaatgacacacagcactcctgcgcatttcgagaaaaaaagtaaatcttaccattttgtgagctatttaggttcttcaagtctatggaggcaatttttttataggaactagtggaaaaatttaatctcataaacctgaaaccgaaagttaccattttttataggatctagttaagtttatagattcattgaagtttaaggctttgaacctacattgaaattgcaaacttattgtgaagtgtttgcttataccaagaactgaatggttggttgcaattggaaataaataactcattgagcattgattccttgcaacagttgaatccaccttcgtggcagcataataggtccatcgattcatttgttaaatattctgtgatatgtctgtcatctttgctccgcctttcctttagtactttactgatctaaatgtttttacctagtcatttccagtgttcttgataataccgacttaaatgtttagaatttcattttggttaccacagaagttatttaacaatctttattgctccttgttcttccttcaggtctgctctgtattttgttgcctgttacttctcgaggataggctttcaggtatgttagctaccttgtactgcttattttgctcctttgtgccactatggtgagtactgttcgtaatgctgtttcaactattcttctatttttaaagtataagtactcctaaatcatactcctgtaattcgggttaaatcaccatgactggacataaaatatttttttttctcgaacacgcaggagagctgcgcatcaatatattaagaagaaaaaggggaaaaataccccgaaacagacagacccacatacacacacaaacacacacacacacaccggaaccacctagccagaaagaacaactggaataggggcagggacagagcgtttgtcagctgacaaacaccccaactaaaatagagaaaaaaactacaccacccgtctttgagctaggaggtaagaaaaacccttagccccagccaaagaccacaagaaagcttcctccctggccaaccggacgacccccatcaaatttggatgggagccattgaagacaacaccatttctatgtttccacaacatccacgcgcctaaagcaaccaaggagtcaaagccctttttactcattccacccaaccgagcactattgaagcaccaccaatgatcaaaatcatttatatcctgtcctggaaggaagtcctgcaaaccataaggccttagcagctcaaaccagaaatgtcgcgcaaaggagcagcccaccagcagatggttgatagtctcttcatgctgatcacagagcgggcaaagaagcgactgagtcaaaccacgtttagccaatctatctgctatccaacatttgttgtgagccacaagccatagaaaaaaccgacatttgccaggggcccaagtcttccaaattcggtcagcctgcttgaaaagcaccgagccatggaacatagcactgtaagcggattttgaagaatactccccagaactagagaacctccaaacatgacgatcttgcacattgggctgcagcaaggatccttccaaaatctcagccaaatccaaaaactgcacccagaaagcataggaaagagctccctgaacatcttgaacccacctcaaattagtcaatgcttccttcaccgatctacttttggtaacctttctaggaatagaggcaaacacagccggggcaatctcttggatgcagtgcccatgcagccatttatcagtccaaaaaagcgtgtttaatccatttccaattacagtgaacacagcagacttgaaaaggcacaccacttcctttgagaaatgaagcggaaacgcagcccacggcctccctggatctgatttctgcaaccaaagccacctgactctaagggcccaaccaaacagttttaaatcaaaaagaccaagaccacccaattctttaggacgagtgactttactccaagccaaggaacagtgccctcccttgatttctttcctgcctttccaaaggaaagctctccttaatctgtcaattgccttgattgcccaagcagggaggtccagggccatagccaaatacacaaatctggaagtcataaccgactgaatataaacagcccgaccagccttggtcataagcaccgccttccaaccagggagcatgactgcaatacgatcaatgatagattgcaattgaggcctagatagacgttttaaggataacggaagcccaagatatttgcatgggaaattagacaactggcaaggtaaagatgcctgcactgaagccagaacttcctcatcacaatgaattgggaaaacattactcttctgaatgttggtcttcagacccgaggcttcaccaaaaactggacataaaatataacatcctgagaccaattttccaatcttgtagtttgtgtcggaattcggaaatagtttcagttgatttgattatctagcaaactttgctattattaaaatggaagctttgttgttttaccttgttgtttatggctcaacaatcacagatggcattgctagttattttagagctatcatgtattcatgtacacttagctgcttgcggagttattgtacaatgcatatgctgccatttgtcattattggcctaatttgtctctaatcatcatcatcaacaacaaagccttttttagtcccaagcaagttgggataggctagagttgaaacccaatataagtcacaaatcaaggctcaagcatgtggatagctatttttcattcgctcctattcaaagctaaatctttgggtacattccatcatttcaagtcttcttttactactctttttatttcaactttggtcttcctctgcctctcttcccattatcgtcgcgcactcgccttaggatgccactatgcactggtgcctctggaggtctttgttggacatgtccaaatcatctcaatcggtgttggatatgtccaaaccatctcaatcggtgttggatatgtccaaactatttcaatcggtgttggacaagtttttcttcaattggtggtacccctagtctatcacgtatatcactgttccagactcaattacttcttgtatgaccacaaatctaatacgatttacacattttcgcgacacttatctattgaacatgacgtcttaggccaacattctgcatcatacaatatagtaagtctaattgccgccctataaaacttgccttttaatttctgtggtaccctcttgacacagaacacagatgtttgcttttagcctgagaaaaagtttaaacttgtagtgttgggtactgtgtactaaaatcttgaactgattattgtaaggccctgtttgtttccctacaagattatataatccagcttatagattatataagcacctattgacttgcttatggattatcataatctaggtatctagattacataatccacataatttgggttgtttgcttacctctcacttatttaagctagattatataatcttgggggtaaacaaacaagccctaaatcagtgcataactgcatataagagctaatgtgctaatgtgtatcaatagaaacaatcgaaagcaaaaagccaaatcacccgaatagtttggtatactagttctgattatctgatcacattaccctgttacaactgcagtcactggtggattagttactatttatctattctttatttcaaatatgcaaaaagaatgattccattctttaatatcgcaccctgcagggtgacttatccaattctatctttgttcggaagactctgctaaggtcaactttggagttaattcattcaaaggtgatcttttgatattttctaagcaacttcttttttgttatatttttggtttcaaatttgttcaagtgttctatgcttattgagaagtgagttttttctcgaacccgcatgagagctgcgccttatattaataagggaagaaacggcaatacaaaacagtgtggggggggaccccacacaccccaccagccctaaaacattacaaatctaaacgacccagggccaactccttgagcccactgggccctgcagcacagcacagcacacagcatactccgatgagatgcgctgtaatgccctaccaacagcaggttgcagcccattaaacacacagccatttctacgctttcagagctcccaggcgacaagagtaatgacagtattcattcctttcctcgattccttggaaatctgtctctttgttctgctccaccaggatgaaaacagtcatctgtgggtcgcggaaccaaagatggaagccccagcttttgaaagacaacagcccatacttgcctggcaaagacagcagccccagcttttgagaagtgagttcattattttgcttcatatatgttctagagtatgaagggcaggccgcaggcatcatgcagtggtgagagctgtctcattgagtctacaggttgcgtgttcgaagcagcctctcttcatttgtgtgtgtgttggggggggggggggggggtggaggcttgctttggtttaccccttccccagatcctactcatttgggagcctgtagcattgggtctgccctttatgttctagagtgtaggttcatgtttccgatggtggtatataaatgaactgatgcgcaatagtgcaccatttaggaaaaagataaaacagtatagtcataaacatcaaattgttcttttaacatttatatacagaggtaaattttctgaatcatatttagtagcttcgggattgaagataccttgcaatttttccccaccttttgagtttgttatttactacattcgttctcgaatatttgtcgcccactagtttatttttgaactaaaccgtgacaaataaaaaagaacggagggagtacttattttcttccgttcattggcattatgatccaaccaattcaaaaaggaagtccttttttcctttcattttgagtattccttcttccggtgctagcagcaagtattgtttatgccatctgttcatcaaaaacaagttctagacgaatgagtcggttttgtagttcttccctttggatcagaaattgtaaaacattctgtgcagttattcttttaaagaaaaaaggggcagacctagtgctggaggctcccacatgagtggggtctagggaaggggataaaccgaggcaagccttcccccgcaaatgcggtgaggctgcttcggaccgcaacctggtgactcagtgagacaactttcaccactccacctggcctggccttaggttatttttttaaagatggaactaaatattctactcagttacccatttgtggtagctaattcatgatagggtaaaggatcttgaggacaggaataaagttgatggtgctcttgttgtgttgggttcaattccaaacaccaggaaattcgtggaagggtggtgggcaggtggcactggtgtggggcgggcagcgctcaagaggggaagaagagataaggctgtctgttgggggtccactgatgacatgtggtgtccaagaaattagttaacattgaccaagtttatagaaaaatatattgacatctacaataccaaaaaaatgcactatcaaaacatatttcatggtggatttaatgaaactattttgatgttgtagatttggggttttggcgcatttttctgtgaacttggtcgaagtcagagaagttagacttacaacaaaactaaaatatcctaaatttgggaacggaaggtgtatatacaacaatgctgcttatagtttaggtattgggagccagaagtagttgatttgtgagtatgtttccaactaccaaatcctggtgacacccttacacacatgtgggtcaatgtagtgctaaagaatgttcccttgtatgtatttagttttctgattattggcattcctggattggtgagtttgctgtgcatgtgtagtggcgaatgtgtgtttgcatctttaattccaagaaaagcttgctatttgggttaacactaataacgaattgggggggggggtgaaatggacagcaatagtgtattatgacaggaattctatgcaccactatgtccgtcggtaagcttcatgtggaatgggtcattcattttatttcttccttgagatttgcaagctgaatcactggttcattttttatgacaggaattctctcttttgaatgaacaaaatgttgttatcattcctgaagctattttctcgctgtgtgctggcttttcatcaccagtaattaattcatcggatatattgcaactgtttggtcattgtaaaattcattccaaggtatattgtttgtttgtcatcacaagattttacagattacagtactgtgcttctgaacttatgttgttgttcacttagtgccaatttgatttgttttagatgtctcttgaggatgataactgggttcttaaagatgaactaccctactctgtggaagctttgtcagaaatcactctggatacttgtaccaaggtgctttactcattgttctctgtagctctgctattagttcttgtgaatgttaaataacactttgcctgacagtatagtcttttatattttcctcgtctctcctttgtttggtttgaacctgaggttgaagcattttttgacaactaggtttttcgttttgtaactagaatatctttcatcaatgaaacgatataaaaccctccgacatgatgtaaaagaaagcatgctttgagcagcgtgtcttttttccttccctgttttgctggtcattgtaagctcatcaaacctggaactcaccatgaactaactaatgtacaagttccacttttgcatggaagcagtttttcttagaagagagtttcctttggttttataggaagcaactggaagcagtttaatcaaaaagactttatcaaacttttcattgtggctattagtgccatactgtcatttgttgcaagcaccatcgtagtggttgattccatctggaatgcttggtattttgtatggttcaataaagtttaccgatggttaaacccatagtttgttgttttagtaagtcagactttggtgatcctagagattattcttgaaacagcgaaaagggcctctatcctagtggttaagggctttcgagtagcacctccaagacctaggtttgaaccccttgagggcgaattttcaggcttggttaaaaaaatcccctcgctgtgccccaaccgctctcgggttacgatgtcctgtgtgccaccctccggttggaccgttgcagaatcgacggttgacgtcgccctgttagtgatggggggccagggttcggggattttctcggacgggaccattgtttcagtctcttcttaatataataccgggagggtggtctttccctccccggccgagtttttattattcttgaaacatagtttttgtttgacttctactaataaagtcacagaagatgctttattggttacaggttatgtctcataaatgccaccttatacatcttccggggactatccagcaaccaatgctcctagagctcatggaattcatgaaaggatttgtggcttcaaatgagcagtttgagaaagtggacttgaataatcttgttcttgtttgttctcttctctgcaatctgattcattgtgcattgttgtcaaggtatctgttttattttagtgtcctggtctgctttattttaatgttagtggtacaacatttacatctctaggaatttttttgcacccaatgaaattaagcaccgtatttcaagaattagttttgccttgagctgacagcgatatggttgtgttcagattcataatttttgctgcaattgggaggcaatgtcccataagtgggacccatcctccctcatttttctattcctatgcatctatttcctgaagtcttgccctaggctgggtcctgtccacacgactgtcagcctggttgaccgggttgttcaataggctgttttccagtggttccataaaactggcattcatcccatttattccaggttcacacacatgtccagtctttctagcaaatcagatcagtgcaccaatcggttcttgtttgactgctgtcagtctgtttatggttcaagctataacttgagtgtcacgtagtgcccatgagtcttatagtggtcatctttcagtatgcctaacatccttttggtgttatgtgatgttttctcaggaccatggaagaaaaatcttcacttttgcaagaaacagtagattatgtcaccaatattttaaaacatattgtgtcatttgttgtgaagaagaatgatgaactttctcatggtcttactaacataagttcagcattggatacaatgggctctgctttctcctcaatcaagagcttactgtcttctccaatatttaatctgtcaagagttgataatggagtttgttctgttgttatcaaaagcattactgaattacttgatgaactcttggtggcaatttctcagctgttttgtcagatctctagtttagtgagcaattttgatgcagagagtactggtaaaatgctaccaacatctagtatcaatttagaggacctaaatcctgttttggactgtaaaagtagtgttgctgatatggatcttgatgtgatggactctagtgaagtagattctgtcacagctagtgcgagtggaagtatgggtagcttcttacgacctttggaatggaagctagatctagtttgcattatttcaacttttttctcagtttcatcacttcatacatgggaaattttgtacagcttggtggataaagaaggtgacgtgaaggtaatttttttgatgatagctgcttaatattgttgtaattttatttcaatgctatcctggtaatacctggtttcattttgcaggttcgccaggccatcttgcttaacctttgcagaaacatctccgcgtcatctaaaactgtatctttagtggtactctatagctcatatctttaattagacaaaattagtacttatgctgttggcttacgtgtttaattcaaccaggcatttatgtgatttttaacatgttgacatcgatcatgcaggtccattttatagttgatatgagggacagaggtgcaagttcattacttggacctgcagagtgcttaactcacatacatgctttattaaaagcgttgatagctatccatggtggacagaatgctgatggaaagcaaccaggacgcgaagtatttttcagtgaggttggtatttatgtattttacacgttatataatttactgtcttgtcatattttatttatacattcaaggtttcaatgactgaacacgagtttgtttggtgcagtttctttttttattgattggacattttggtctcagagtgaaccattagaaacttaagtcagaataaatcatgtgattagattggctatcatttctttagtcttgaaatatccactaatttagagaaacacaatcattttgattggctgttaatttcagtgagtggcttacatgttctatcctccaactgactgatagatatgtttccactatctgcagaaccaggatatcttatttgacttgttaaatagggctacagacataagttctgtagattggttttctcgcatcaagttcattgattgtgtctcctcctttgtttgcctgttccctgatgttgcccaggtgattcttatatcttgcttttatcaacagagtcgccattgaaatgtactccactacattagtaatttgatatctctattataattgcaggatttgatcggatgtttgcttgacatgctgcatgatgctgattaccgtgtcaggttgtatttggctaggcaaatcgtcgtgttattccaaacatgggaagggcacaatgaattatttaatgatgtttggtaggtattgacaactatgatttgatggttttgtgttaacttttagaagggaattaaatagtcatatgacgaacaattaccgacttctgactcaaaactaggccggtaggggaaagactgccccacgtattatattaagaagctgaatcagagccccgactgagaaaggtcacgaaagatggccccccacgcagcatgagggtttgcccccctataggctagatctttactcgtgctttgagtcctcccagcccctacacgaggatacgcccccataggccagtccatctcgtgtgcacacaaccagggaaaccagtgagtgactttttttaacctcagcctcaaattcgctcacactgggattcgggattcgaactcaagacctgaggagtgctacttagaccatctaaccaactcaactagaggcctacgactcattaccaatcatcttaaacatgtaatttgtagagtacatttagccttttccagaccatggtatcaccgcaaatctaaaaagtgccaatccagttagtgctaacaggtacctgctgctctaaatgataggagtgttgctcagtttctctataatattctgcagctaatcaccgctaatttcctagagttaaaaatgtttaatctgaaaaggtgacagttggacattcagttgatattttatatgttattcattttgtacatagaaggtagaagttaggacctattgaatgtaggtgattgctggaacttggtatcatccctgtcccccacatttgacaaggctagagaagtgcacacagatttatcttgtcaaatctaagtgagaactatcatttagataattgttattgttatatatttacattttgaagtttattatttaaagcacagactactttgcttttgctatcatttccttgaatgaaatggcagcttgtattcaggatattttcttggattgctgatatagaattttgggtaaatattttggtttatgtcttgggcagtctgttaggccttatgggctgggacagttgtattagaccgcctcttgcagcttacccatatggccatgcaaaacactgttttgcactgttcgcagagtggagtttgaatatggggatgagatgagtaaacttctggagatattcttagaggaccatttgagttaaggtaaaagataaaattagccatcttggttaggggtaagcctctctgcataaaaaaggagatatatcaatcaagggaagcaaataagagatcaatcaattttcatcttcccttcgttagttcatggtgtcatcacatccccattacctgtggcctattgttcaggaccacgtcgaagttacctatccatccaacccccacctccattacatttacctgtggcctattgtccatgctgacggcttccggtttggtgacgcccaatgcggcgaagggcacgcccagtccagccgcacgcgtgcgcagatcggctgcggcggccgcgcccatgggcgcggcggacatcgagaaggccatgggcgctcgacggcgggagatggcaaggaagtgagggtggcggccaggagatgggcctggtggccggctggggaagggggagagagggtggcggccaggggagacctggcggccgactggggaagggtggcggccagggaaggcctgacgaccggcttgggaaggggaggaaaaaatacctagctctataccatgtgggaaaccctaaactctaaacgggattctaacaatttatctcctaattttctgtaactgaaatgataactgataatgaatcatacttgtgacttttaactactagtgcaaaagggcctctagttgagttggttaggtggtctgagtagcaccctcagattttgagtttgactcctcgtgggagcgaattttaggctggggttgaaaaaaatcccctcgtatgccccaagtcaaagcacgtctaaggcctggccctgacggtcgttctcacataggatatggtaccactgtgtatgactgggtgggggttcagggatttcatgacccgtgtgagaacatgttcttcttaataaaatgttcggtgtttgtcttacccccgcaggatgagtttttacatctaactattagtactctttagtgtgattgttagcttaacaacgttttcctatatcagctcaagcattggtgccaagatggtgaagttctcaaatatttctccagttacagctagagaagtcttagctgttggtccacaatctgttctcgtaattgaaactgctctcattacactagctcatttggctgtgcatagcgaggatgttgaagttgaggtatgtccttgtggtcacaccttgtattgtgcaacagaagcacagagctatgtgctagtcgctagtgtttgattgatttttttctctgccaactgtttttgttatggagcattgttttcatatcgcctgatcgtctgatcgatgccactgggcgatcagacgattagttgcgattaggtgacgatcaaggtgattagtcgctatttggcaccagcgagccgcactcgcacaaacaggctcgagccatccctggtacatgcatgcagctaactgctggatttctaattttcctaatttatcaaattcccacttgaatgcagcactagtaccacgttgcacatgcatgcagccatgcagggaatttatcaaatacccccacgttgcacatgcatgcaggcgccgttgcccctacctgcattccgaatttattttaaaaaagagggcggcatgttttttgtgttatacaaaagtatagctgtttttttttctcgaaagcgcaggagaactgcacatcattatattaagtagaaggaaaagaaggtccaaaatagacccagtagctctgttcttaaggcgtcgcctaggcgtccaggcggtggtctaacgcctaggcgccttgcccgcctacctcgcctaggcgtcgcctaggcgccgcctaggcgtccaggcggtggtccaacgccttggaccgccttaccgctttaaaaaccatgcccagtagacaaaaaccctcctaaggaggtttaaaacaatgaaaaaggaaacaatctatgatcctagaaaaaaaacaaatacaaccctacaacgagtagctaggggacactgttggtggcggcaagaaaggagagacccttagctcctgccatttcccacaactgctgttcctcccttgcctgacagagagctgcggaaacactaggggataatccatcaaagacaattctattccgatgattccaaagaatccaggcgcctaaggcaataagagaattgagacccctcatagccatatctccagaacttttgtcaatcttctcccaccatcccataaaagaccagtaccaggaataggagcaagattatgcaatctgaattggcgcaagattatgcaatctgaattggcgcatcagcaggaaccaaaattccctcgcgaaaacacaagaaaccagaatgtgatccaaagtttcagactcctgatcacataaaggacacctctccggatggtctagtcctctctttgccaacttatcagctgtccaacacctatttagcgctgtcaggcaaaggaagaagtggcatttggagggggcccaagttttccaaactctttcatagtgaccgaaatcaacagacctagtgaacagcccttcatatgcagccttagcagaataagccccatttgcagcaatactgaatatatgtttatcttccacatctggtagcagctccaaatctgaaatcaaattccagagatgaagataatccactaacacccccacagaaaagagatcgatcttctatctgtcaacgcctcctgaaccgttcatttgttagtgattcttttcggaatggcatcaaataatctaggaaccagatctgcaattttctgcccatgaatccatttatcagatcaaaacaaagtattagccccattaccaacctttgaagtcaacaccatcgagaagaaagcccttgctttgtccggtacttggataggtaggctgcaccaaggtcggttaggctcagtcttttggagccaaagccaccgcatgcacagggcccaaataagttccttaagacaaccgtccagctggaggggtctacaaactctgccccaggcaaccagatagtgccctcctctgacctccttgtgccccctccataagaaacctcttctaattttgtcgatagccttgatagcccaaggggggatatttaccgtcatagcgagataaataagcattccggtaagcacatactgaacttgcacttttctgcctgctcttgtcatcaaatctgctttccaacctgggagttgatcaacaattctatccacaataggctgcacctaatccttggtgagatttttcagggacaacggcagccccaggtatttacaaggaaaagttgagatgtcacatgggaggaggccctgaaccatttccaactccacatccccacattgaatgggataaacactagacttttgttcattgttgcggagacctgaagcttcaccacaaagatgtaagatatctagagtaatagcaatatccacagtagatggatgcaagcaaagtgccacatcgtctgcatacatagatacccgatggctgatgcagatgggttctgggggaaagatccatgagcagacctgcgtgttcagctctggaaaacagtaggccaagaacatccattattaggataaaaaacatgggggagagaggatacccttgtcggagtcctctccgatgctcaataggtcctcctggaatgccattcagaagtacttgagtgctagaggaggatagaagcccacaaatgatgtccctccaaacctgtccaaagccaagatgcttcataacttcgatgagaaaaggccaagaaaccgagtcaaaagccttagtaatatcaagctttaggagaagacgtggccttttttgttgatggaaaagtcttgcagtttgttggaccaacatgaaattgtcttgaatgaaacgtcccttaatgaaggcactctgaatcggagacaccatatcattcaaactttgacttaatcgattggccaataattttgtaatcaactttgcagcactatgcactaaactgattcgcctataatctttgacatggacaaccccatgttgctttgggattaaagtaatgtaggccgagttcaagaagccaaagttgtcaaacttcctattccaaaccgcagaaacaactgccataaggtccatcttgataattttccaacaagatttagagaagcgcccagtgaaaccatcgggacctggggccttgtcattaggtaaactcctgattgttttccaaagttcaagttctgtaacaggctcatcaagatgtgctagattgtaagttggcatatgcaacacctccaagtcaatagtctgctccctatccccacattcaccaattagcttggcatagaaactgtccaccacaaccgttttttcatcatgactagtgaggatatgatctccgttcatcagctgtgcaacaaaattcttgctttttcaatgtcaagagtgcatatgaaagagtttggtgttagcatccccctctttaagccatgaaatcctcgatctcgatctcgcaatggtacgctaaagcgatgataaaaacagggagtgttttttcagcaaatttcttagctagatttcagccaaggacaaggatctactatcctgcgctatttctagcctatggagaatttcccttgacagagccaactgagtcctcacatgtcccacatgcttcccactccaagattgcaacttccttgctgtagcttttaacttcacgtccaaagtcataaaagggcaatttacagctgccacagattcccaaacctcctggacaacataatggaatccctccaacttggaccaaaaggcttcaaaacagaatcgtcttttacccattttgttgtctctaatgccaagcagcaggggcagtgatcagagccttcagaggcagcgctttgaaggacattgtgaaatatctcttcccactccactgaacagagaaccctgtcaagcttaacaaggacatgactgtcttgctgatttgaccccatatatttacgtctgtatagtggaatctccttgagactcaagtcctcaatcaacttcctaaatctccccatcatagctctgtcaagatttgagttgtttttgtctgaagctctgtagatgaggttgaaatcaccggcaatcaaccaaggtccaaagcaagcagccctaatgtctctcaattcttgaagaaacaacatcttatcactgttactctgagggccataaacacaagttacccaccagcaacggttatgttcattgcagaattgaattgagatgctgtgtctgtcaatcctagtcaacccagtaactcccaggtggcgcttccaggcaaccaggatgccaccactagcagtctagcaccactagacggtagaaaggagaactggcagaagtccgaacccaaggctgctagaatagttcttgtagagatgactgtcattttagtttcctggagacaaaccacatcggctttagaagacaaaaccagattccgaactgagttttgacgatcagaagagtttaaacccctcacattccaacatataatcttgcccggttccattacaaaacaattataggaaggcgacccaaaaagaaaacagactcactaagggaagaggttccccggagtcttccagccaaagagtgccgctaaagcttcaacatgactttgagataaggaatgttggaaaagattttcataatcctcaacggcttgctggttgatgcctgcattctctgtgatgactttcagagaccgcattacttgttttgtggctctgatctccagatcctgcatgttgaattccacccctgcccagcgacttgtcggctccgtcgtagcgcagtaccagaatctttggcacccgttgatcgcttggaaaaaaacaggagccgataaaagttttgaaggttcctttgttaccttggcgatgaaggatcttcttctagagttcatagagggagacgagtccagtaattgctcacaagaatccccaaaaagcagtctggaactatcattagagactatctactcagatccgagtggagcagttgaatctgcttcaacacccgtccctgttccactgaactccaacattaacggcccgtgaagcctagagatggtctcagacggagtagcaacaactccttccacgtccgaggggggataggacggagtaactggtgtcacttcaacatccaggcccaatcccatagactaaacctccacagcatcacaatcattatctgcagttgtggtatttcccgtagtgattattcgacgccgttgatagaagagtttgactattgttgtaccaccacaagccatcccagatagcataggtatcccacttaggatcgctttaaaataaccttggtccctacatgggatcagaagtggcttcaaaaactttatgggtggacataattgcagccctttctaatcccgactggctgtagaaatcctcaataagtccgaaggctgtgacctagaaccccctagttccatcgatatatcaaaacaacaggaatcaatggagatcctggacgtttgacgaatctcccattcaacaagaaggcaatctagaagtgggtcagcgtggtgttgtaattcagaagcgtcaacagagcacgactcagggagagataacaactgtctgggccctgatcggtgactggctgaacgtcccagggataagttacgaccatcccgcatgaaggggttagatctcccatcccccgttgcaccttgcccttgatgcagtccatggtgggcatgatcttgagcaccatcgtccaaattatcagtaggaggaccagaatgcgaattggaatcgttcggtcggaaggcaacggaaaaacgaatagtgattgggtaacttagagctatggtttctccaacgttgccctcaacaacctgaacagactcgacaatccagaaatctcttgaagcaggaatagtagacggattagtgcaccaagcagagcatcggaagcaggacaaatcttgcagcgccaaagtatcctgatgcacctgatgaatccaagcaaaagggctaagaagatgttccaccgtactagtttcccaagcatgaacaagaattcctccaatctccagatcaactaagtatgggaatgcaacccccgaagcgcccagaaaccttgtccaacgtttacaaataacagagaacatagctgttctgatgatagaccaacgactgatgaggagctctatcatggtaatgtcagggagaatcagtagcaaactgcttgaggaaatcctgcggatgaccaatgatgtttcgatgatattcagtcgtggagccagaagggcggcaatctctgcttgacctatcacaaggtcactaataatagttaacaccaccgcagtcctgagatcatcctctgatgccgaaagcttgttactccatcccataatgcatggtgagacgatactggtggaggcctgtggatcattgatgtccagagcttgcagcaatccgccacccaaggagttgcccgatgttgggcttgcatgccttctagtcgaacgtcgtcgtttgcgcggtcgacgtcgacgaggccggccagccacaacaccggagccctcacccagatcggcattggcatcatcagctcgcatagagtcccctgaatcacccgacaaatgagaaacagggccccagtcttctcccgccgtagaggttggcttgcgaggaagaatgggagcagctctttccacctccagatgttgatgagtcttccgtctccacaccagattcttcggcttagatttcaccgaggagagcctcctccggaccgagacacgtgcctcaggtcgaggatgctccctccatccaccagcgaatgtaggcacaccatcatatttgaattgatgaattgatgccatttgcactctaccacaactgtaaataaatgctagagtaagagctgattacaaaccagcaatgtcattaaaagtttctcatctccaaaatcttccgctgaaaggcatttgagcacttgaatacaacaccccaaaaacaatgccttcgtgaacacatgttttgggggagccaaggaaacacaatatcattaacaaggcaattgattgctgaccaaaatattatccagttggtgggaataagatacattgcctgtacacacagtacaagcaaatctacctacttcaaatccaaccttgattattatgttcaggaccaacaacacattgtccaatcagctagaggtgctcaacgattccaccaggtaatcaaatgtctgtcttcgaggttttatgttgtccttcaacatacctgccaaccatgctatgccctcctctgatcgattgatcttacagaagccattgatgatgtgatcgatttgtccacaccagtggctccaaggctttagtctgcatcaacttgatcaggtctactacatcatgcacatgcccgttctcgcacatggcacatgagaggactgaaggttgacgacgttggctccaaaccggatgatagcagccactcaccaggccagagagttgcaggagccagagctcgagcctgcggcagccccttcgctaggatgcagtcgtcgccgcgtcctgctgctcctccagtcctcttatatgcgccaaacccggcttatatgcactgcctccccactctacggtaccagtctggaggaccgggtgcctgatggccacaactcccttgactgctcggctccgctgaccagacacccaccgccttcgcaccactgcaggtatccccatcgtctcaatcctggaatcaagccgggcatgtagctgccttgaactaagttgcccttcagaacctaggcccatgagtcatggattctggcacgacaaaccacatgtccccgacggatggtattgtcatctcccgcctcccaccaccttattcctccatccctataggcaattgtactaccatccttgttgcctctcgtggctgttctgtccttagtaaccaggttcccggatcgatgggatcgaggaacgggaacgtggtacgcagtacgctacaaaaactaggatttaacactattggaacgagattgttccaacgttcccagaacgaggaacgtggccaagttcccagttcctggttactaaggctctgtcctctccacaggacaccactctttttccttgcacaacgtcctagtagctccttccattgttcataaccttctctctgtccgtcagtatccttgttcctttcttactcctttcttaatgaattgacaagcagctctccggcgccgtacgagaaaaatccctgttccatagagattgactcctttggttatcttgtcaaggataacctgacgcgtgattctttgttgaaatagctcgggcgacctatacaccatcaccccaacaacacctatgattgtcccgcatgccagctattaggaaatgatatgtatatgatctgttagactagaaaggatacagatacaattaggatatgaaatgatgcatcagatttgtatctatcttccttgcacaacaagcctatataatcatatatatgaaatccacccccaattaatgggtgtgaggtgtcccctaattctctacgacattgaattgtttcagaagtattggttcaatcagtgatttatactacacatgctttatgcagttcacattttagtcgttcagtcaactaagttgtgtcctctgttttctgatgttgcagtgtttgttcatgatttctgctgcggctgctatagagccttctcagcggtatttctttacaagcaatgagcatgtctatgttggtgtacaaaaatattttttaagatcagtaaacagaaaccaatttgatgcttcatttagttttatggttacttccttttcagagaattagcttttgcgttatttgattccatttcaaggaggcttggttatgcttcaagaagcaaggtgactggacacttttgtagtgtatagtctgtacagtttttttgttgttccttttcatagtgtgtcaaatgtgccaactgaatccgagatttttttatgtttattgtaaaagagaatgaattgttttgacatattacagtttacatattttgatacctctttggtatgcagtatctggaccaagtgatgggcccgattctttttcgatgggttgcttgtgagatgaatctaatttcacttgttgaggtaacatttagttctaatgtttctggatgtgtttctgatatcatcatagattctcccccataatttccttcaaaaaacgaaaaatgtcggcatggattcttaatatgatattgaggtttctctgtggagtgatataaatgattccgtttatgagatttgcctaactcaatttacatgattttttaagaaaagagttacctctgcttttataaagtgatgagattcaccaggaagtgctagggttggcctgcatacaaaagcactaagaaacctatccaacaactatcctattactattagatttcaccaatatcagacagtttcggttacttcgtgttctttggcgccaacctcgtcacctggaccgccaagcggcagcccgtcatctcccgctccagcgcagaggccgagtactgcgtgtggccaatggcgtggtagaggcctcctggctgcaactgaagggttatgcgaaatcggaggtgttgacggtggctgttcatatggaactgtagccgtggccgtgccaaaaataggaggcccaaaaatacctaacacgcatggtcggtttgtagtccaaaacggacgactagaagattagcacacctaatcaggtcaatacttctaatcgccccataataaccgacctggccgactaatcgcgatttgttggacgacttgaaaacagaacttagaattgctgaaaatatttggaatcaaaggaaccaaattatttatgcttgatttcatgatgttatgttggaaccaggcaaaggatcaaactcacgtgacaaacgctagcactctaatatactccctccattcacttttgatagtcctattttcaaaattgagtttttcatttttcatagtcctatttgagttgtggtccgaaatctgatataaatgactgtttaggtccccgtgcagatcatctagaaaaaaagactggtgcatgtatacgaaaacatcaataccgaggagttttcgcaaaaaaagaagtgtttgatgatgtaattaattagatgataagcaagagttcttctccttggtcatacatactagatccaatgtacagttgtggtggcagacacctttttttggttttctgctagtgactacacactgaaacagtgcgaagctagctaacaacttgacatacatactagatccactaacacgcatgtactaactaatcacattcttaaccacctggctcaatgtcaacacattagagccacatgatcatgcaacataacaaaatgatgtggttaaacacatctatcccatacgccacatgcaaaactcagaacacatacaagtcaaaattagtgatgacgtgttgaccatatgctagtaacttttttgttactatatttaaatatcacctttgttttgtttttctgtatttaatatgtagtgtccaatactgctaatgcaacaggtgcaagaaatgtttggttatggatctgctgagccaaacaactttgttgaacattgtagttcatggcttctccctttcctcattctcaggggtgatggtgctgatatgaattggatatcgaaggtgaatgtttactgttattccaaaaagactagttagtgcataatatatcattagtttatacgtaggggtcatataaacctatagaaatgcatatcaacagctaaattttctcatcccatcaaaggaaaatatccaagactaagtacagcatccccccatcttgtcttctttagaccttttttttccacttcttaatataatggcgcgcagttctcctgcgctttttgagaaaaaaacttttgtgttcacagtcctgtttccatgttctaatctctctcttatatatatatatatatatatatatatatatatatatatatatttgttactcagattttatctcaacctttgtcaatcattatcaagagatacttcgttccaatctttggaatgtgcattgctgtcagatgtggcacagggccagagaaggacttagctgaaactgtcttatgtgaatcagttttgcagcttggtgaaatttctgaacttgagcgtgatgatctcattaaaaaacacatggtatgcttcccaattagaacatctcttaatctgcacgtgctttctgatgttccattgctgtagtattctatcttgtctatatcgtttaatacatatatcagccataagccttttaaaacagccaaatttggttatatgtgttgcatcatataccgaccacactgatgtggttgatttaggttgctattttttttgtcgattatggcattgtgttattgtggatggttggatgcatttgttgggtgcatgtatcagcggtgctcacagcccaagatggggaacaaggaatcaacaaataaagaggcttattgataagattgatcaagggatttgtcttgttagctggcaagataggttagttgattggctagctagtatctgggagatttgtgattcaaaactatcagtattgtgtcatgatacggtagtgctggactattttggtagtaagtatgagtgtatgacaaagatttttagaattgttgaggtgattccagacctttgaattcaggcttgcaatatctttacagctgtagttaataagataacattattctgtctgttgacatctgtcaacaccaaaaaatactaactgagctttttagatgcgtgatgtttgtgctactactaattgtgttcattcccagtttcattcttgcttattatgtatgcttatgtaaagttgtttcaactttggatccttatcgtgctcattcttctatttataggttgcgatcgttgcctttttgctctctgtttcttcatctgctcatgggccacaaattccatatttttccaagaagaatgttgcactttcagtcagaatggttgttgatggatttgtggacacaatgtatatcctcttcgtttcgccctatgtgttctaatggttaaattataattcgcgaaagggcctctagctgagttggttaggtggtctgagtagtactattaggtcttgagttcgaatcccagtgggagcgaattttaggttgaggttaaaaaaaaggtcactagctggttccctggtgtgcacatgagatggactgacctatgtggggcgggtcctcgtgtaggggctcggagggctcaaagcacgggtaaagatctggcctatagggggtggaccttcatgctgcatggagatgagctttcatggcctttctcggtcggggctccgattgagcttcttaatataataccgtggtggcggtctttcccctaccggcccagttacattataattcaatcattattccagtatcaggactgacttttcacatttcagggatgataacttggctgatacagttgttagtgataaagttaatatatttcgtgctgacagagtttttaaggtattctgtttgtctcatgattatcatttttatgaattcaaattctgcaaaggataatgcatttgtctaaccctcatgtttttttgagggcactgcctagcccctagctgctgcaatgcctttatctttgttggtatagatcagggttccttacctggactagagaatgcagttattgagttgaggaagtggtataatatgacaatactgttaataccgggtttcaaatcctcgtctgcaagaaagaaaaaaaccgtgctgtgcttcacaccaaaaatagtggcagcgtgtgaatatgtggtaaccgctcagattatgcaaggcgtccgtagtggcagtggccaccatccagattatggtgcggatcaatagggtgaccccagggtttggggtttccttggctggtttgatttagtgcaaagccgtggtggcagttcttcgctcactggtcatgtttttagtgtgcactggaaaaccagcaggtggcagttagttgttagtaatatagaggctgaattggatgataatattgaggcccaatacgactactatatatagatacatgaaagagacaagagggaaaccctaaacttggagattggactaataccctggacttggagattacactaatacccttgactattataccttaacaccccctctatagtgttttgtactgttttatatctctagtgttaatttattattaaatttgctaagctatcaaaataatgatgaaaaatttaacatgtgttcatttttaaaataaagtatgatgtcatatataacctcacgatattaaactcaaacttgtatgctttagaaccaaaaataacatatcttgttaatggctaaattgaaccaactcaagtagttggaggtagtaaatcgagacaaacattagtttatttggacatatggcaaacttgattgaaagaatttgtactttctttaaataatcgtgacacttgtccaaaattttatgctgtatatacatgctctcaggagcaaagcttagtgtagggctcaatgttttcaagtcgtctagttgaccctagtcgtatagctaccgaccagtcgactagtcgcgattagtcttcaaccagatccacatctacatgcatcaagcagatgccgtgcatctaatcaaacagagaggccagggggcacacatcaaacaaggaaagtagagaagtaaatcacactctatgctcccagatatctctatgaacaaactgaggatccttttgcagtatcccatatgtgctttaaatttattcttgtagtacaagaaaggtgatatggaatttgtcatctaggatatatcatactttgatgatgaactattaagaattcaggaaaaaaacaaacaaacaatatttcaacatcaaactaagaatacactacatcaatacgaaacccatttgcatgtttatttaaacaataagttgcgtattcatcattatccaatttgttttgatatttatggtttgattacatagagatcactatccaatttgtttgtttttgctggatacatctaaacagcaactttaaaactgtacttgtggtttgattacattgtgattaaaataattacttattttgtccttcattaaaaaatgagtttccctgaatatttttgtagcttgtcctgttagtgggcataaggtgttcacttttctatctcatttctctctacaaacagtattgtaatagcacgaaatggtcgaaatggtcttctttctgtgaaaacaaataatataagtttttgcgtataaactaaacgagcatgacttagatatgtaaatatacacaatcttgtagagtgtggtgtgattatgatcaagttccatctgtcctcttaatctattgcagttcctgttgtcgatacatcagcaagttgcagatgccagccattccaggcacatgggtcatcgtctttgtgcaattgaggttttaatagatgtacttgggcacagagtggttcttgagagcacttgcttgtgagtctttttatttctttttcctgttttattgtttgtgccacttgattgtaagatatatgcgggtttgaataatactacatttatgcaattacctgtgcaaacaaacatttggatactattctgacaaaagagtcaacaactgcagcaccgccttgctttatactactgtagcaattacttgatgttatttctgataaaagaagcaaggaggtgcatgcattgagcatgatctctgcctaacatccatgtgatttttagaactacagaatatgtgttatccaaacccctccttgctttataatacctaggtatttcatatagctgtggtatgtttgaaatctccaaaaatactttgttttcaatcaaggtcttagggcgtgtctagatttgttggcagcttgccacgcctcaccttgctaagcaagactaaccttgccaatggagatgagacaaattggctcgcttgctcaagcaaggataaagttggaaagcaccattgacgagacaatctagctgtgcatccaaatgttttttttgcttctgtgttcttgctgagctgtggaagcacacattggagtcgaaaggtttcagacttaggaccaagaccgagtacatgatgtgcgatttcaacgcgactagacatgaggatggagacgttacccttgatgggcaactggtcgctaaggaggagtcttgtcggtatttaggatcgatgctacaaaagaatggtgacattggtgaagatgttaggcacataatttcagtggtgttggtccggggtatctggctgcagctctagtccatcaatcaaatcccagacgagcaaataatcagtaatgacctgaactgttagtgctccttgaatatcattcacccaactcctgatagcaagtgcctgactcactgtacgccgctttactgcctttgtaggaaccaccttgaagaggttaggcaccatttcagcaagtgttttaccttggatccagtggtcagtccaaaattttgtggatctcccatttccaaccgtagtatacactgccatatcgaagagagcaccagccttcatggggaccatgactgacagtccagcccaaggtctagaagtgtctgtcttttgtaaccataacaaagttttgctaggcgcttggcggaatctaggcgatgacccttagcctagggactagtccagcctaggcttgcctaggcgatgctaggcgtttttctaggcgttttgccaacttatataatatatacatttatagataaaaaatagggaataaccgaggagacatacttttatcttgcactttcagattgaccctcaccctctgtcatctgagttctaaccaacagccaacaaattacaaactgaatatgtatggattatgggaataaccgaggagagaaacaagattgggaggagagaaagcaggagccgcaggccttgagcaacagtcaacaaattacaggagagaacagagaagcagccaagcaggacaggagcaatagtcaacaaattacaagattgggaggagagaaggaggatttaccgcgtacaggagagaagcaagcaggggtcaattttcttctctggcgcgcgtccttttctctgcgctcttccttttcttctctgcgctcttccttttcctctctgcgcgcttttcttctctccttttcttctctgcgcacttttcttctctgcgcgcctgttctctgcggcgcttttttctgcgcgcttttttcttctctgcgcgcgccaggctatcctcccgcgcgccaatttcttctgcgcgcgcgcgacttttcccgcccgccttttttcccacgcgcgcctagcacgcctacgccgccgccttggctcctgggcgcgcggaatcgacgtggaatcgcccctcgacgccgcctaggcgctcccaacgcctagcagcccgcctacccccctagtccaggcgggaggccgtggcctagcgactaggcgcgcctaggcgcgtcgtagtcgtggattttcaaaaccctgaaccataaccaccgggtgcgcagggcccacccgaaacgctccaagtcaagcacccctaggcctccaaactgaaggggtcgctgcacattcgcccaggatactagtaggggtgacaatgggctctaaattttgcactataagatttaatgatcggatcagattaggatcgggccttatttctattcatttttgaactaaaatttatttaaggccctaccattttgtgaagaagcatttggatcatgatccattaccacccctagatactagacaacatcccccacgagcttgcacttgacccttccacggaaaacctcttctaagcttatcaattgatctgatcatccatctcggcaagtctaaagcagtcattaaatggataagagttgtggtcaatacagctttaaccactaccaatctgccagcacgattcaaaagtggcgccttccacccaggaagcttggccgccaccttgtccaccaggggcatgagcacagctttcggtgttttgcgaagggtgagtgggagacccaggtaagtgcatggaaagttagagactgtacaggaaagttcaccagacaccaaggcaatatcctcctcagaacattgtatgagcgctgcagcgctcttaggcaggttgcaactgaggacggaaacatgaccgaaacaatctaaaatccccttgaccatgcgcagatcactgctggctggtctcacagagaggaccacgtcatcatcatataacgatatacgatgtaaactgagacctccatgaataggctgcaaaaggttctcttggctggcagctgaaaccaaggagttaaggacatccatgacgagaataaaaagcatgggcgagagcgggtccccttgcctaagtccacggaggtgagaaatggtctgtccgggctgcccatttatcaagacctgcgtagatgcagtggagaggagtaagctgatgagattacagcacctcctgccaaagcccaggtgttgcatgatttccagcaaaaaagaccatgagacggaatcaaaggctttggtcatgtctagcttgagcatcacatggggctgcttgcttctgtgcagggaccttgccaactgatgaaccagcaggaaattatcttgaatgcttcgacctttgataactgctgtttggttattggaaaccagatcagggaggtgcggtgccagcctattcgccaaaatctttgtgactaacttggcaaaactgtggactaagctgatcggtcggtagtctttcaccgtgatggcatcttttttcgggatcagagtgatgaaggctgagttcagcaacctgagcttgaaaacatggcctctgtggatggcatccagagcacggagcacatcgctcccaatgaatctccaacaagacctgtagaacctgccggtgaaaccatcgggacccggggctttgtccaaaggcatatctttaatcgtggcccaaacttcctctgccgtgaagggctcatcaaggtgtgtcaggttcatctgttgatggtggaaagcagcaaggttgagagagaaggtcctctcctccgcacaccccaacaaattactgaagaaatcaaatgttgcttcctgcatgccctcctgcgagaccagcaaactgtcctctatttgaaatttggcaatgaaatttttcttcttcctgaaacgtgagtgctgatggaagtatgctgtattggcatccccttctttagggctgatttggtgacaagggatcacgggggggttggaggggattaagggggaaattagtccatttccccctcaatcccctccaatcctcccgtgatccccttgtcaccaaatcagcctttaaggtgcagcactctagatcgctgcctagcaattgtacgttccagggacgccaggcccagacagtgcaatttaagcttcttctgtagccactcctcgccttgtggtagcacacgggagtctcttgcaatttccagttgatgcagaatttcttttgccattgctaactgaattttgacgttcccgattttgcgttgattcactgatcagtatttatttattttaataaaaataaaaaaagttatggtaaggtttatgatctatggattattggaatatgtgcaaaagcaccttgtcaaggcctaaggaggcccatggaggggctgcggcagtagcagccatggccatgggtcctccaagggggattagataagtatagttagagataagattagaagattgattgagattatctaggagattatctaggaaggttattaattagtagtttgttgagagttttaaggaggtaaggatctctagctagacaggggcgaccagctggcctagttatgtaatcaatagatgagaaataaagtaggcaaaaaattagaaggaagaaaccctcctcttgcttggtcgtgggcagaggcccccggccgacgtttctgcccatcgatacccctctccatttcctcaccgatctagcgaccataacacacctccctttataagacaatgtactcataagtgcaattgtttattgttatgttctattgacatgatagcaatatgttaagaggttattgtgttgtgtgtttatcctgtcttatattaacctgaacatttgatattgtatgtttctactgcagctatattatttctatagtggggaactatattcagcaaaaaccactgcaaggccagtgctgtaatattttgtctaaattgttggctgcttttgatggaaacacctctgctgaaaccctgcaagtgcttggcagacagcttcaggtggattttacaaacactaatccgaaaaaacaattgtttaatgaacttctgtttgctcagcacttacaactgaactgtcacaggtagtagttccaaaattaattttttcctgcctaattaatgagaaagaagaaagaagtggtactgaagattcatcaagagttctttctttactccatcaattgacagtggagattgatcctctgctttatgattacataagagtatgcttcatcttctctacatatataattgcattcttagttcttactggtatctgtgtgttgttattaagcgtaatttatgtttggtttattttgttttgactggtcgtacaggagttagaaccacttcctgatcttgattgcttgaaagatgtacaggagtttcatgcttcactttctgcctcacattcttcaaggaatcagttcttaaaggtcttatttttcccattcctttcttttctttttttaatttatgttcattatgagctgactcatcacttttgacttcctgtagtttgttaataaggctccttatttaccaccagaactatttttgttgaggtaatatttccttggtgtaatttcatccataccatcatttgataccaccagtctgtgtcagtgacatgtaggggtctggttctacatgtagcatgttgtacatgtgggttatggtcctacatgtagcgtgttgtgtggtatttgcatccataccaccatttcagtgcagtttttttcccctcaaacatgcatgagatttgcatatctttatatcaagaaaggcgctagggtttaaaaaccccatacaaaaaacacacacacactcctaggacaactcaagaacatacacatttggcgatacagaataaaaactcgactggtaggggaaagaccgcccccacggtattatattaagaggaagctcaatcggagccctgaccgagaaaggtcacgaaatctggccctccgtgcagcaagagagtctgctccctataggtcggagttttactcgtgctttgagccttcccagcccctacacgaggatccgcccccgtaggtcaatccctctcatgtgcacacaaccgagggaaccagcgagtgaccttttttaacctcagcctgaaattcgctcccactgggatttgaactcagttcctaaggactgttactcagaacacctcaccaactcagctagaggccctttctcttggcgatacagaatagatcaacccaacccaaaaaagtaaagctcatttcttctactttgtcattcgtttgagcctgttggagaatataagtgaattgccccctagctgttcctattagcttagccttttggattgaactagttggtgcatgcgacttaaaatggtataagaaccaaaggtttcgagtttgaatcctggttagcactaaaataaaataattgttgctcgctcgtattccatgtctgggacctaagagaggctcgatgtgagggagagtgttagagaatatgagttgcctagctctttctatcagcttaagcttttgcgttaaagtggttggtgcatgcaacttaatagatcccaccagtcatcaaaggaagtggcatcagactggagttgaaatgtaacacaatcagttgttcctctctgcccacatagcctgcatatttcattacctgttgatttcctccttgtgagatgtccagctgattgaattttatcatgaaagacggttagaaaatttagaactcgtgggaattttagtcctctaccccatcatttattgattgctaccttccaaaggtcataactctgtctctatacaacgatcttgtactgaatttcacagatttttctagctagcacttgatctcagaccatctgtcaaattgacatgttccaacttttgtatcatttctttccattcgaccatctccacatggccagtgttcttctaatgcttaatgtccatctatatttttatagtgtttgccactttttttagcaaacacaaatgagagccatgtatcattattcattatattaagaaggaaaatggggtaataactatgaactaatagaacacacacacacacccttaacacacaagcaaaatgacccaactttaactcattcatctgcacggcgaggaagtaattgataccttagatttagccactcaaatattagtgttagaacaaattccaaataaatgtttggacccagctcgaaattgtactaaggcttatccatcctatctctcattacatctcctaattcaaacatcactatatgaacagtgcagtctaccgatcatatgcacgatttggttgagataacctaaccacgtgtattccgaaaacctgttccttaaagctcttctcacattcttaaatgaacccataagatagcgttgttttatttccaaacaagctggccaaaattgtgacctcacacttctttcatttcttatactttcaaaatataacacttcctatattttgtattattatttttcttttccaatgcaaattatgttagcctagacccttatggtattgtattattatttttcttttccaaacacgtttctattgttataacacttctttcatttcttatactttcagtcttcgtgcgtatcacaaaaagttatttttgggagaaatcattcgtagaagtgacctatctgcggctgatacaaacatggttagctgctggcatagtgacccagatgtcatttctgctgtatgggctcttgttgacatttgtagctcatcatctgtagcaaatgaagcttcttgggtgcttgctgattttatctctagggtatgtttttggccttaatcttttctgatgctacagtatgttggtgatgtacaatttttcatctcagtcagttgatttctttaatgctagcgcaggctggtatatctgatgcacatcaagtaatattccgtctgccaactaccaccgaaaattattctttacaactacatactggttctgcttccaaggaggataaattatccacaaactatggtatttctgatgatgttctggttgggcttttgaaactcttgaagacttatttatctgatgaatctgttgaaataatagatgctgcttcacaaacactgagggtatgccattaaattgcacacttattaattgctgggcacaattcctgttagacatatgtgtgtgtcataggtgtaatgagcttaggcccaatttatatagctttctatctattaatacaacaaccctactctaaatagggttaggggtttctattctatccaacatggttactgccactctctcctccctcctccccttcccatagccgccagggccatccgctgacttctccccccaatgccggcaatggtcgacaaccccacccccttctccctccctacaccacacctgggcttccatggttgtggttgcaacccctcatcccgcactagccgccgctccaccctcggtcgtgcccctcctcccctcgtctacccccatccaagatgcagtcgcgagcccgacttgcccatgccctaacctccccaacgctcggccctgtggccacctcccacccgcgtgcttggctgccatgcccgcggccgacctcctcccgccttcgccaacgcctgacaaggctgcgatagtggtcatgaacccagttctctgtgagaggtttgccaccattcgctctccttcatcgtcaaccatgctcgccattagtctgctcgccactagtggccatctgagcaactctttgggtgtgcctcccctgactctcctcgtatcatgtgtctttgcaacccactactgctactcccaccgactgggttgctgactctggcgcctcgtaccacaccattcttgacctcgatactatctctttatctcatccccacaacaccaccttcccttcttccgtcattttcggtaatgggtcaactctgcctgtcacctcagtaggtaatacagtcatacgtggtctattgtacctcaacaacatacttgtttcccccgacatcgtacacaaccttctcttggttcgtcgcttcaccactaacaaccactgttctatggcgttcgatctctaggggctcaccacacgggatcttttcacatgcggtggtcgctcgatgcgacaacacatgtcccatgtatcctattcgtttccccaccccacctccctcatcccgtgttgccacaccctacgcccttgctgtcgctgtctcggctccacttggcacctttgtcttgggcccccaaccacaacgttctctccagactctcgagcacctcgaccatctcttgcccccatgacaaccttgcctcgccatgccatgcttgtcagcttggacaccacattggcttacccttaccctcttccatgtctcgaaccgcttgcccctttgatcttgtccactgtgacctttgaacattctcgctaccaagcatttctggttacaactactatctggtcatcctagatgacttctctcactacctgtaagtcagagacctttgccaccctatctcacttcttcccatgggtgttgaatcaatttggttgcaccatcgggcgttcagcgtgacaacaggcgggagttcgataacttcatgtctcatgccatctctctcacgcggtgtgcacctgcggatgtcgtgtccgtacacctctcagaatggcaaggccgggagcatgatttgcgccatcactaacctcattggaagcctcctgttttaggcctcccttcctgctcgttactaggatgggggtctccacactgacactgccacctacctccggattcgcctcccctgtaaggcggctagtcatctcactccttttttcgtcatcttcagcaccacacctttttaaacgcactctgcgtcttttgctgcgcctgctatactaacacctccgccaccgctccccacaaacttgcgccctgctccacttgctgcattttcctcgggaactctgatcataaggggtactagtgcctcgatcgtctgacccatcgcatcatctctcgacatgttgtttctgatgaggacactttcccccttgttagttccccacctcctgacctcgactctcctcgatgtcgattccgtcgacgtccctctctccttaccatcggtcccggcgacctccttcgtgccctacgtggcaccgtcacctttgactgcgcctaatgtggccctgtcagttttgatggcgccatgcatgggtcatcgccttcgacgtgccatgcacgacctcgtcgccttcattcatgccacgtgcggccccgtcaccttcgagcgcaccacgctgatcggtggtgctcacgaccgccaccactccgagtcccttgccttgaccctccttcgttcgtaccgcgctcgccgatccgcactggcgtcgtgctataaaggagtatgcgaccctgttttccaaccacacctaagacttggtgccatgtccccttggcactaacattgtcacctacaagtggattttttgtcactatatcaaggtcgattgtcggcttccactcttgccattcctcatacgacgtcaatgccatcaagattcttagttggagcgcgagtgagcgggtacactgccgcaatgattgactcccccctaaaatttggccgacagatccctccgtttcagcagtgcgtgtgctaccgctaacactgactggtttggacactccaccatatcgttctgttgtggtatgtagggcacaataagctgatgcaagatgcatggtcactgcagtgtttcgcgaacttggtggaggtgaatcactcgagcttcctttcgcattttgcttttgccattgtttgaacttatcggattgagtcacccgcacgacccttgatagagagcaacaccgccaacatatagtgaatgtggtcgttaacgagtagcacgaagtaacgacgtccatcgggagtaggtgtagagatgggcccacagacatcaccatggacaagatcgaatgattgctgcacgctgtacttggccttctttaggatgggcacacatctcttctttgtcgtaatgccggcgtcacaatgttgattgacatgctcgagcgtcagcattccgcacaccatgtcatccttggacatgcgttgcaggtagttgaaagagatgtggttgagtggatcatgacaccactaggagacaacattaacgtggtgggcggcaaggcacatcgagcgcgtggtgttgtggcgcagaatgtagaggcgatgttaccgtgttgcaccttgttgaggagcattgttgcggacccccaaatatggagctcgtcgtcattgatgtgccgaggctaatgatgcagttgcgcagggggagatgaagaagacctgtgtcgaggtaccatcattcaagacgcttgacatcgtcctctgttgctacaaggaacacttgtgtgtgtggctcatcgaggcgaacacattctggtgcgaccgagagtgtgcacacttgcgccatgagtagtgtcggttcatcgtcctcctcgtatgcatgggtgaggtgagcctacgccttcttgggtttggggcaatcctttgctcaatgcccaaaccgaccaaaatctctacatttattgtggtcttcatggtttttgctacccttggcattgtcttgttgcccctgcttcttgtggggactgcgcggacgccgctgcgcattgccactatacttggcagtcttgaggccaccgtcaacttttgacctctttattacccgagcgagacattgctcctcgagtcctcgatgaagtatagcttcccgctggagaggagtggttcctatggtacggtttttttagataatggaaacatagtctgaccttggcctcaaacgaggttacgaccaattattacaactgaaggcagcatattgctttgacccatcacacgacctcaccaaagaacaccaactaaatcaaagctactacaaagttaaatgcaacgaagacccccatccaaaattgcgaaagaactgtagtagcaccaactccacatgacgacatgaagacttaattaattcttggttaattgcagcactacacccctagtatggatgattcattgttccaaggatggtgggtactatgatgcgcaagggaataattcccttattgtgctggtggctatggaagcggcgaaatgactttttgagggggcttctcctagcatcaatcatgttatccaaaacatcacgatgctcatcgatggtgcctggcgggcactgcggtgctgcgtgtttttagccttgaagctgtttgttgcagctacgactgctgtttctatagtaacatgtgagatggagttgcagccactgcagaaaaagggcttccgaacagattccttagtgttggctgttagcttgatgagtttttccctagtttgtttagatggatcatttcttgtattttcgtttttggccaacagattggagagaagaggcttgaatcaccctcccaggtgtcggtgacggtggctcgacgacgtcggcgcacaggtcctgccggcggcagggcgtggcggttgaggcgcgtaggtcgtggcggcggcggcgagcaagttgaaggagagccatggggagggaggagaattgtgggagggagagggcggacataacgaccgatgactgagagaattgctggcggcggctgattgaggggtgttgggtgagtaaccctaaaactgttgggctagatttcttatctcatggtttgggtcgagaaagttgcggaccgacttcctaattggcgttgcttagtcttgctggcaggacagctatgatgcgctttgtgctttcagccatcccgatctaccttctcatagccatgaaaatccccaagtgggtgattaattctatagacaagagtcagagaggatttatttggaaaggaagaaaggaggtaaatgtggcaattgccttgtttcgtgggacattgttacaaggcctttgaatctcggtgggttgggatttctaacctgttgtaccaaagttgggcgctgcaagctaaatggttatggttagaaaaaactgatcctaacaagccgtggtctggtttggacttgcctatacaacatgtcaagagattctttacttcttcaattgttacccgggttggtaatgggtataatacattattttggacaggttggttgttggatgggtctcgtatccaagattttgcccctgctgttgtggctaatgttgggaaacgagctatttcttctagaacggtggcccatgctcttgaaaactggcagtgggccagtgacattgagacccctcttaattgtctggactgcagcaatatctaaacatttgggatgcattaaggggagtggtgctcactcaggaggctgattgacatgtgtggattcattcttcctctggacagttctcttcgaagtcgtgttataaagctttcttcatgggttcgattactttcgaaccatggaagaggttatggaagacttgggctccacccaaatgcaatttttttctttggttggcgataagaaataaatgttggacaactgatagactgcagaaaagagggatggattatcctgaggtttgtcctttatgtgatcaagattcggagaatatccaacacctttgcacttgcatttttgcgcggcaattttggtactacattctctcttcattgggactggctaatctttcccctgcctctaatgagtccgcttttgctgactggtgggagaaggtgtgtaagcaagtgcacaaatctaaaagaagaggctttaacagtatcatcatcttgtgggcttggtgtttatggcttcattgtaataaggcggtttttgatggtgtcggaccttccattcatggaataaaatcagtttttttggatgagtttgagtgctggaggcttgccggtgctagacatcttgaggctttgggtcctggtgctgcaattttcagatcaagggttctattgagtgcttagtgaagagcagttgtgtgggtgtgtggcctgctgacacttttgctgttcttcttcttttgcgtgctgctgttttcatgcgcagaaggagactgcagttctgtgcgtagcaggaattggtggtcttgtgtttggcctattttggcattgtactttggtccattttggactgttttcttctcttaatttaatgatgcgcatctctcctgcgcgttcacgaaaaaaaagattgggctgactagtgggcttcttttttttcttctatttatctcttttactaggctaaaatgggcctgctaggtcttataggtatgctatcttgcttattaccttggaattagtgatatataaataatatttggtctaattttacatatttttatatataattaaggcgtcacctcgccttacaccttaccgcttaaaaggtaaaagggggcgctcgccttaactcgccttaccgccttaataactatgttcatgaggaaagggagaaatgacaagttgctggagtaaggggcttttcttttttagctgtttcttgtactgctattggaggactgtagttattttagcagtgtgtttatggatcggtttatgtatgcgtgtgtctggcctccgtaaggagtggtttgtattggggtcctcttgggcccccatcctttcttttttaatataatggggcgtagttctcctgcgcttttcaagaaaaaaatgatggttccccttccactatttattttggacctttctctatctttttttcttgaacgtgcatgagagctttgcatcattaaattaagagaagaaaatagtccaaaaaggacgaaagtacaatgccttaaaaggcagaacactagaccaccaaacttctgctgcgcacaatactccaacatccttctgcgcatgaaaacaacaggacacaaaaggaggcaaacaccaaaagtgccaacaggctccacacgcacacctgcactacactactcacctagaagatccctgacctaataatggcagcacctaggcgcaagccctcacgatgcttggcaccggctagactccaacactctaactcatccaagaaaagatgcacagttctcctgcttgtccaagaaaaaaacaccccctttcaaactcatgatggaagtggaggatctaaagcatttagtttgatcaaatgaatcctatggtgctctcaagtctgtgctttagtgaaaaaatcagttaactgcaactcaggaggcacatactgttgacaattagatagagtaaagacgacatccacaccaatatgtttggtaaccttggattagagtctaatatcattccacaccaataggagcctcatgggccatatgggcctatattagatggacattcgtatacttaacatgtgtgcagctaaggtgtccgacccatccagttctgaccccgtggaataatgctgtcggagcttgtgaggctgccctcccgcataagtcggagggtggcaggtgctagtgcttaattcaagctgcaggatttggagagtagggcggtcaagaaagctatgaagtcttttaaagtgatcaatgatgctgatggttgcagtcaacaaactttggaagattttgctaaagttttcaaacatcccctgtctcaatgtcaggttgaggccttgtctgccttatttgggtggtctgttcctgtggaggtcagctttcagtgagttttggctcctgccgtagttttctctcttagttctgtccaatggatccgtcaaaaattatgttttggaaattggaatgttagagggttgaactccgctgcgtgacaaaatctagtcagagagttagcgtcttctgcgggggttgatataatctgtctacaagaaactaaaatgggtgaggttaataggtggacaatgttgtctatgcttggcacaaatttcagtgattggatgtctctaccttcggtaggtgcaaggggtggcgtgctggtagcgtggaaaagacacttggtccccactggtcaaaaaagagtggataataatagtatctccatccaattttttatttctggagagaatacttggtggctcacatatgtttatgggccgcaaaataatgaggaattttttttattccttcatgagctcagagagattagggcagtttgtgatggcccttggatagtggcaggggatttcaaccttatttataaagcttgagataagaatacttccaacttaaataggcctatgatgggccgtttcagaagactgattgatgatctcgctttgaaggaaatacctctgcttggccgcaaatttacatggtcaaattagcaagctgctctggtgctggtgaaactggatagggttttctctacaattgactgggaggggctctttcccaatatcctgcttcaaagcacagcttctgaagactcagatcattgtccgcttcttttgggccttcgggacaataggtcctttatgcagcgttttcattttgaggcgttctggactaagctagagggtttccaggatgctgttaagtctgcttggggtttggttccaacttcagattgcccttttcagaccttggttttgaagctaaaggccactgccaggggtctccatgcttgtagtgcaagcaggttggtcatgttcagtcccagttggcgctagcgagggaggttcttcatagatttgaggttgcacaagatggaaaacagttgactcccgcagagaactggctgaaatctagactaaagaagcatattttagggttgtcatccatcaagtgctctatagcacgtttaagatcgagtatttcttggctcaaggtaggtgatgctaataccaagctgtttcacttgcatgcccgtcaccgcaatttttttgtgtgtggctaaattagttgatggcgatagaatcctcactggtcatgaagataaagcctccctgattcatcagttctactccaatctcatgggctcttgtttgggcagggatccgactatcaatctcgacgaaattggcatgccatctttcgacctttctgagcttgatgccccattcactgagcaggaggtctgggataccattaaaatgctgccttccgataaggcgccgggtccagatggttttattaggcgtttttataaatcttgctggagtatcatcaagagggatgttatgagagctgtttctgccatttgggcccgtaagtttagcaatcttggcaaactgaacacatcttacattattctgttaccaaagaaggaaggggctgatcaagtcaaagatttcagaccagttagtctggtgcacaattttgccaagctatttaccaagttgctgccttcgagactggccaaaaaggctaaatagtatgatctcacgaaaccagagtgccttcattaaaggacgttttatctaggaaaacttcttgcttgtgcagcaaactgctagagccttccatcaacataaaaatgctagattatttctcaagtttgacattaccaagacatttgattcggtctcttggcccttcgttattgaggttctgcaaaatttaggctttgggctaatttggagggagattatctgtgggctattggcctcatccacgactcaagtcatgctgaatggtatcgtgcacaggcggggaatacgtcagggggatcccctttccccatgctctttattatagctatggatgccttgggctatctcttatctaaagcagaggaggatggtttgctgcaggagctttcaagcagacatagatataatcggatcaatctatatgctgatgatgtggctattctcgtgcatccctcaagttctgatattgctgctaccttggagattctaggcttatttggagcagcctcaggtctgcataacaataatcggaaatctagtgtgtttcctatccaatgttctgaagaggatgtggcggcggcccatgaatggttgcattgcgagtttgcttccttcacttgtcgatacctgggtttacctctctctctctccgcgtaattacaaaggggcaagctcaaccaattgtggacaggatagcagaccaacttgtaggatggaaggctgagttgatgactagagccggaaggagagtgcaagtccaatatgtcctcactggtgcgttggtttatttggcaatggcaattgatgttcctcaaagtgccctcatggccattgataagatccgcagaggtctcctttgcagaggtcgaaaagatgcaaaagaaggacattgtcttgttgcttggggaagggtatgcagacctctacattttggtggattgggaatctccaatcttaaggaattatgttgggctttacgtatgcgatgtctttggcttcaaaaaacggatccagatcttccttggtctttgtttcccattcaggttcctagcaaattccaggacttcttcagcacggtgttgatatctgaggtagggaatggagcgtctacccttttttggaccgacaagtggctacatgggcatagactaggggatacggtcccaaggctgttcgctgctatcccaaacagaatagtgaaaacaaggacgattcaagaggttcttcaaaataggaaatggattggggatattaaaggggccctcactattggtgttttggtggattacctgcagctttgggagatgttggaaggttttcaactacagccggacactcaggataggcatattttcactctatccgctagcttgatctactcgataaaggctgcttatgaagggctgttcatcaggtcggtgtcctttcctcatcatgacagagtatggaaaacgtgggcgccccaaaatgtcgttttttcctttggttagcagcgcttaaaaaatgttggacaactgacatgcttgctaagagaaaccttgatcatcatgaaaaatgtcccctttgtgatcaagttgaggaaaccctggatcacatccttgttgcctgcgtcttcacaagagatttttggttttcttggcttggactttttggtttgcatgacctttcaccgcaacctgagacagtctccttctggagctagtgggagtgtttttttttctcgaatacgcatgagggttgcgtatcattaaattaaagtagagtgaaaaagggcctgtggcccgggacaaacagaacacacacaacacaaacacacacttacccttacaaaacacacaccgcacagacacatacgacacacctacaccccagtcgtttaataggctataagactttcctttctctatccagggtcaaaaagagagcgcatgttcttggctccagcagaaagccacaatctcatcttgtctttaaatccgtcctctaaggtagtaaggcagggtcgagctccttcaaaaacacacctgtttcgctgcttccaaatactccaagccccaaggattaccatactattaaacccctttcttttgctcttgggaatcttggatgaagcctttctccaccattcagcaaaaactgaatctcttctcttaggacccacagaagagagaccaattggagttaaaatattatgccaaaactgtcttgtgaagacgcaattagatagaatatgctgcacagttttgtcttcttggtcacatagaacacaattttcaggatgatcaagcccccctttttttaagtctgtctgctgtccaacatttgttatttgtgggagtgtaacaatgcaactgttggtagtctcattaacaaaggattggactctcttattacattgggagcttggacaatttggaatcacagaaacaagtgtgtctttgatcgtttagcccccagtttggcacaggtgcttaggcaagcaggggaggagtgtgatttatgggtggcttagccaagggtatctcaggtgctgaatggggtggttagtcggttgtagctctggttgtgtgaatgagtgtgtttaggttccttagtttttggcctgcttgatggggtttgtattagagtttgagtttgtccttttctccttaatataaagatgcgcagttatcctgcgcgttcgagaaaaaaacatgttcttttgtagatggagcagaagtttttgaatacccacacttcgaaaaaagggttaagaacccttaacaaagccacacacccataccacttacatttcatatttgtttcagaattttataaattgcaggaagattggattcaattttagttctaggaggcatcaattctagtattctttgtactgtgattcctattaatattttttttatcaaacagggtattctgtcaacagcacgggggctcaatgctctgcagtttcttgattctcccgataggtctttactcatggtatccatgaagcgctgcatctcatgtgttttgttctgataactacattcattttcgttatactgttcgctgctctgaaattactgcacctgcaggttcattcgagaggggtaaacattcagatagttgaacagactatatcacaaatggaacagtgtgctggtggtgagcgtacatttggttttctgtattagttgaagcgactatatcgctccatttcttttaattcatgacactacagaatgtacccttcctaatggatgttttgaatatttatgccacatataccagaatataatattcaaccatatattgaatttggcagttgtttacaaatgtcttgtaaatagcagctttggctaatttctatttaagtcagggtaaaacacatgcactaaagttggttatagattgcatgagcattttacaatcagaaaaaacttttgattttgtaccattttattaatatacatagatgatagaatatttgtaatttaggtattgtaagggcgtgtttggcaatggctctgctctacttcagagcaactctactcaaactctgggagttttgctgtagagctatgccaagcacgccctaaatctgactattgctacacaggccaaattttgcgagctattaatttgtacagtagaacacagaagaacaggatatctcatttgcctagtcatatgtggttctttatggaatgctgaaattgcttcttgatactttgtattggcacaacttaactttttacatgtataaacactattagaataatgaaaactgagcactctctgctaaggtggacgtatgtggtttcatgccatttaacgcaaattaagttaaatgcagtttgttgacctttggttctgtagtttcacttgatgatgcagatgtgtgggacactgatggtcgaacttgcaagcaatggctgtgcacccttgtcagctcacttatttgccactgtgaagataccatcttgaggtatcatttcagcttaagaaaacatttgtaacacataccaagtttaaatatgatagtactattcaatacattaacatctatcactgcttgacattggtattcttcttatagactctgtaggagtattgtttttgtcaaagttaaggctgctgagcttttgctttctagtactctagtgaacattgctggcaatgttgattctaatactgccatctgcaaattaatttcaacaaaggtttgtaggattcccaaattattcaatactttacagttgcaatctagggttagtcttagtgatttgattatattcaatgtgctgtaggttgagaaaataattttttccgactccaatcattcattgaagtcaatccatctgtttctggatgcactgaatgtcattagatctttttatgttgctgaaaaagccagaactttcccttctaatactctcaaggtatgttgttactgttgttctctattgaagtgcaccacgtgttgcatatttcatgttgaagtagtaattgaaatgatctatttcttataccataaccaactgtaaaacaagtaaactcattgaatacttaatcgctgcctcccatctgtctacctatatcaactagacttgttacttatattgttaacatctttaagccaaggaggcttcatgtgaccactgttattcttcacatgaatctcatctgtcctcaagaagccctgttgatgattacctgaaactgctagcgtgcactattcagtgaccaattgagttttggctaattttgtataacctttgttgattctattttctagtgatgctctctcctagggaagggacatatgtttcctttttttgcattagccagtatccagaaagtattggtaatgttattgtcagttatcactacctttgtctaaatgtctattgtataattttgcctgaacaatgttattcatatttatctcatcattgacctaccatttgaactattaggatggtagatctgctagatcaaaaagtcgatcaccagtgacaaccccatcatcatcatggaagaaggtactttattctttatccttttttcctagtaatgagcatgccacatttatttgggatatctgaccgtgttgctctcaattgtgatatgcgatattaaatccgtggagagaatcatgttgtctggctgctgcaaacttgtagactctatcatcaattcatcatgtcatgttatttcttttgggtatgtctggtgcattggcgagagctgtctcattgagtcaccagatcgcgggttagaagcaacctttccgcatttgctggatgaaggtttgctttagcttatccctttcgaagaccccactcgtgtgggagtctctagcactgggtgctattccaagtgtctacttttattttcatcaaacatttgagattggttgtctatatccttctctattatgcaaccaggagactcgtgcctccaccttaacactgtttctacaccttcgtacaaggcgatccctccatcagtgtctacttccgcaagatgaagggcatggtcgatgccctagtggatcttggtgaagccgtgtccgatcgtctgctcgtcctcaacctccttcgcggtctcgacaagtggtttgagcgcatgaagaccttcatcaggcacaccatgtcgtttttgtcaaagacacatccattacagttcttccacaaggtccaaaccccaaggatgatcaatctattccatccttcctgtgccacaccatggacctgactacagatcttatgccaccactccatgaaagctccattgcctagctgggggccgtgttttggatattcagttgagataacaacttaaaccagaattccctagcaaagacacaaccaatcagcagatgatccaaagtttcttgtgcttgatcaataaggggcatctttcagggtggtccatgcccttttttgcagcctatcaacagtccaaactctcctttgagccaccagccacaaaaagaacttggtcttcggggggccccaagttttccatatcccgtgaaaaggttcaaactttgttgacccaacgaaaagaccctcataagcttcttttacagaatatttcccgttggctgcaaggcggaaagaatgcaaatcctctaggccacagctgaactgagtcaaccaagtcgcacaaagttaaataatcagaaataactccaacagtgagacctccttgtatgtcagaaatctagctcctggtttgtgagagcctccaaaactatcctcttgcgcaccttctgtttagggatagtctcatataggcggggtgccaggtccctaattctgtgtcccatcaaccatctatccgaccaaaatagagctgggcaccattaccaatttcagtttgcatagtcaccaaaaagaattatcttacaaccttaggtacctgaataattaaggaagcccatggccgattcggttatgtttttgccagccaaagccaacacattctaagtgcccaagcaatatccctaaggctgaaagggcctctactgagttgggtaggtggtctaagtagcactcctcaggtcctgggttcgactccccgtgggagcgaatttcaggctgtggttaaaaaaaatcccctcgtctgtcccacgccaaagcacaggtctaaggctcagccccggtcgtggtcgttctcacatgggcttcgatgtcgctgtgtatgggtggggcaggggttcgggggttttctcgacctgtgtgagaaggtcttcttcttaatacaatgcccgagtgctgtcttaccccccgcaggtcgagttttttttatatccctaaggctggaaatgccaagtccgcctagctcaagaggccgacaaacctgtccccaagccacatgacaatgtcctcctttcgcctccttgccaatgataaccccggtgaatcttatcaatagctttaagcacccaaactcgtaagtccaccgccatggctaaataaatgaccaactactgagcttgatctatcaactacttcgccttccactattccttactgcatactgtttttgaccattgcttgtaaaagaaaagagcaaagtgatatccttcctatatgatagcagtatcaactactagtactcatgaaaatgattgaatatagggagcattgttttcggatcgcctggtcgtctgatcgatgctactggacaatcaactgattagtcgcgattaggcgacgatcaaggtgattagtcgcccctgatcgaccctaatcgtccacctggtcaccttatgtatttccaggacatatctatatatagtatacatagtgatatatatgtatactatatatagatatatacttatatagtatagagacttgctcaggacaagcacaagtatatagtatagacaaggcattagtatgaaatgaatagtacaaacagcagtacaacactagcaacaagtctatataaagctctgaagtctgaagtacataacattgccaagacaggagctctgaagtctgaagtctaaactgaagtttgaaattttgatccgaagtctgaaccgaacaacaaaatgagaaaagattgggcgactacagacatataccttcagcgaggtactcatctccagttcctgtgtgtctgggcagccggtgtagagagaacggtgaacaagggagagagaagggagccgccaatcctgtagcacagcagtcgtcgtgggctcttggtctgcagggtacaggtaccatgtctgtagggattctagggaagacgaagagacaggaggatctagtggggctaactctactgttggactaccctgaccctgagtatttatcgtgactgatcgctaactagacgattaatcattccatatcgtcgactaatcggacgatacagatgatcagctaacctgatcgaatcgaacaccatgatctagctgagagtaccgatcaacctgactaattgcgattagtcggacgatctgaaaacaatgctagggattacatgtctatcataacaatgattagggtctagcatccaaatgttcaagataagtgtcataacattaatttatgagcactcttggatttgataacactggagtagctatttgctataattgtgtttaggtttcctgttttaacaatacaccacatgtagtgcagtcgtactcataaatgcatcagtgcatgtactgtatttgtcataggtttaaatatgggccgctgcaacaagcctatcgggtaaacaaagacccaacaccgggccctggcgagccgccacctcacttggcgtgctactagggaggcacatgagcaagggggtgtagcccctagagtcctcgtgtcgggagaatccaaaattgggaatagatggaaattcggagatagcctttgataagtttgtaataaataaagtagagtttgattaggaaaccataaatatggggacattgtatggggacattgtaacgattttgatctgagcaaaatagagctattgattctccctctctatgtgcttacctccctctctccctacgcctcctcccctgccctagccacaacccatccccctcttccacaccaactgcagcggccatgacccctccctagtagggttgtgataatattccagtgctagtggaccattgtgaactctttataccttattaattctgggtattgtatatcttgatattagatagggacaatttctgcgtgcaattaaggcgttgctaaagcggtaaggcaactgggaggaagcaaagttaaggcgaggggaagaggcggcacacggggaagaggcggaggcgtgcgaggaagagacggcggcggtggtatagggaggctgcggcgagggatctgcgacaaagaagtgctcaagcggttgtgcgtggaagaactgcgactgttgtgctggggttaacctaaaattgtggtgtttggctgggctaggctagttggtaatgggcttttttttctttcttttttcgtgtttttttgtatttgttagactaatatttggtctaatttttatatttatctatataattaaggtatcgtctcgccttacgctttaccgcttaaaaggtaaaaaggggtcgatttccttatgtcgccttatcgctttatttactatgacccaatgtctcttttttaaaatgtttattctctaggtatactggctttctgttgattatcttgttgctgccagagctgctagtgtaagtgtgccaccttttcttctgttatcatatttttatctgtttgcttattatgatgtttgtttcttttgattatatggcgtccactatatagattatagttcactacatgtctatttagctttcattcaattgtttctgaaaccagggtctccaaggtaattttctgtttgatttataactttatgccttgattaatggaaccaaaatgttgttttatgtgaatactagtattggaaaacccccaaaccctaattagggttgggctgctatattaatggatggaaaaagtatgtaggttaggtctaacctcattacagctgtataacacacacacatgtgtaacacccccaacagtcgcaaatctaggcattacatatgttgggactggactgaaacttcgagaacaccgtagaggggagccccttggcgaatatcgccgacggcgactcgctcgcggacaaagtagaggtcgatttccacatgcttcatgcgctggtgctgcacagggttggtggagaggtagaccgcgttgacgttatcgcagtagacgagggtggcgtgcgaggggggcatggagctcctggatcaatttacagagccgggacgcctcaaccatgatgttggccacaacgtaatactcgacccaatgctggagcgggagacgatgggctaccccttcaaagactaggagacaaggttggcacctaggagcacgacgtagctagagttgtaccggcgcatatcggggcaggggaaaagcatcctcattgaaaacatgttgagagatgatgcagtgggtaagaaggtcgaggcattgataccccttgtgatcagaggaatacttgaggaaaaggcaacatgtggatcaaggtgtaagcttgtggcggaggtgttaggatagcaggcacaaccaaagatgcggagagggtgaagaaaggagcgggatgactgaccaccttagggctagtttggaggacagggaattggaggggatacatggaggaggcatccccttcaattacctgtccaccaaatcagcccttagaggggaggcagttcaggagatatgtggttgtgtggaggccctcagcctactaagggaggcttgaaacaggaggatgcgaatgaggttggtgatggtgcgaatcatgcgctcagccttgcgttttgaggggagctttaaggacacgaatccgcaggtgcacgccttgcgagagaaataaggcacgagacgtggagttattgagctcccacccgttgtaacactgaacaccttggatggtgcaaccgaactaagtcaacacctacgcgaagaagtgagatatggtggggaaggtgtcagactacgacgaatgggaaaaggccataggttgtgagagaagtcatctaggaagaccacatagtgttggtaatcgaaaaggcttagcaattgggatgtccaaaggtcacagtggatgagatcaaaggggcgagctatgcgagacatggaagaggtgaagggtaagagagtgtggtgaccaaactaataagcatggcaatgcgacgcaatgttgccgtgggggaggggaattgctgaggtgggcgagtgtctagggaggacgttgtggcggggtggtcaaggcaaaggtgccaagtggaggcaaaggcagttgcggcgagggcgtaaggtgtggcaacataggatgaagaaaagggggcgagaaagcgaatagggtatacgaggccaaagctatcgcatcgggcaaccacgacacgagttgttaggtcccgtatgttgagcctccaggtgtcaaactccatgtatcagtcggtgggagtaggagtgggctgcgatgatgcggggtacgaggagagagcatgtggaggcacccccacagagccaccgggagaggcactggagccgccaatggcgagcatgctgacagcgagcatggatggtgggttagtgtaactgtagtgttactgtgtatacttctagtgtaatgggccttggctcacctgagcacggcaatatcaatacacccgattagagttagggtttctctcattccaatagtggtgacgaacaaggactcgatcgtcatagagaatctcgacactgcggaacaaaaactaccatgtagcgtggcagccatcctggggatggacgatggtcgagctcgacgcagtcatagtgaccctatttcttgacccgatcaaaggccacgattgtgccccggagagattgcccgtcatgaagggagacactaagatgtagggaggtgcatggactgtggcagattgaaggagattgaaggacgagtgtcaagggagcaggtgcaaggagtgccagggcatgggcggctcaggcggcctccagctagttaggcgggagctgcgtagaatatgtgtcgggccaggcgagcgatggctgccggaagcacgctagtggccaccagggaggatggcgaggtggcattgatgatcgtggtggtgcaggtgtttgctacaggcgccggtagtccggtcacaacggggttgccaacaacaatggtggagctactagcaacgagggccaacagtttgggcgcagcagtgcgatgccaaggatagcgggcatggaggtggggtcgtcagccgctgtggggtagagggcagagttgtcggcgcaggtccgagcaatatgatagtgagggttggtgcgacgcccgtcaccggggagaggagggggctgatggatgcagcccatgggaggctcgccgtcgggaaggggaaagacggacgctagccggagcggggccgccgtggaggtgggggcgccatccgcagttgggaaaggcaggggacaacgggcgcggggtggggtcgccatgggtaagaggcaggggcactgcccatcaccgaggagaggaggggattgacgggtgtgacccaggggaggcccgttgtggtgagggcaccgcctgtcatcgggaaggggtggggagtggccggcgtgggacggggaatggcaaccgcaatgttggcaacacagcggcaatgaaaggggtggccgaccttggagagatgtcctggcggcgccgctcggcagggagaggaagggagcgaaggagacaagcttggtaccatattggaaaactcctaaaccctaattagggttgtgctgctatattaatagatggaaaagtgtgtgggctgggcctaagcccatttagctatataataacacacatgcctaacaactaggagtccatctcttgactttttatcataaacacacactagcttttctttggcggcagacattcacacaggtagtttttgttttatgtggccactagcccttatcgacttctcatcgcgcttgtgcgcacacacatatatacatacgcatatgtaaatatatgtatacatagacatatgtgtgtatatatgtagctgatatagggctaatacaattggcaatgatatgtcctcctaagtgatcgtcattattctctttaactacaagatcttttatgctactcttttttctctccttaatatgatgatgcacaactttcttgcgtgtttgaaataagatattgcacgtgaagcttgttgcttttgtgacgatttttatggaaagctcagcatctgcagtctgcaaggttgcagccttcagcaatagcaaaatgcttgccctttaagcttttacacaagatattttattcaattttgactcccatctaaatagaaatatctgtttcttcacagcgatgttcatgtgactttgccatactaatgtatgttgagctttggtgtgaggaacaattcaataggctggtattaggacctccagagttttccaatgaagagttggtcaggcttcttttcgtttctccaattttttctttagatttattttgtgtttggtttagcttcgttacttgctaatattgtttttttgtatttctcacatttttcagttgccacctcatgttgatctgttggttgctgcatttactcgtataaatgaaccagacagcatttatgggctcacactatctaatgaggttatcttaaaaccttttccttttgggaagattcatatttatgagttctagtcatttttaagttggatatgaccatatgttctctcattttccgttataattgaaagcaatagagatagcgtagaataatggattgattgcttggagagaccgatgtacatataggggagaagagatctcgtggctaatggaaacaaaatcaaatgagacctctacgtatctctctaaccatataaaacggccgacatgctatatctggccacgtacccattctatctatatacacaccatatatgaaagtataatgtatagaagggccaacctgctatacctagcacacacccataccatacacacacacacaccatatatggcagtctaacactctcatagtcacaacgtcgatgagacgaatgttgagactggaccaaaactctgaagacagaagctgtcatccctttagtaaatatgtctacgaatcgggacatcgttggaaatgaagtacgtgaacaaaccccaaggtcacatgttctcgaatgaaatggagatcaatcgcaatgtgtttggtgcgttgatgttgagcgggattaatattatcacaatggactagcatggtggagcttagtggagtttgcatcttagccaggagttagtgtaaccaagaagcctcgtcgactacattggcaataatacgatactttgcttctgcattttcttttctcgaaaaacgcaggaggactgcccctcattatattaagtaggaaggaagaaaagggtcagaaaggacccggttaaaaggacctccttatggaggccaaaaacaagcataaagaaaacaatccatgcacaactaagaagatacaactattctcagactatggtactggctagaaaggatagaccctcagctcctgcaacggccatttcttcttttccttagtagtggcatctaagagcatagtgatactgggggagatcccatcaaacaccagtctgtttctgagcttcgagatcatccaagctcccaaaatcagaagagaatccactcctttcctagtcatgtctgacacaataacagaaattcgcttccaccactgcaagaagtttgtgtcatccagaagaggagcaagactgtggagaccaaatttcctaaggatgatgtaccaatatattctgaaaaagacacaagaaaccaataaatggttgatggtttcaggctcctagtcacaaagagggcaactttgcttctgcactggaacattagacaatgttctgacgtttgtatgacaaaaaattcaagatatccttaaggaacacagcatggctcgaagtggaatactcttgagtgcctcaaggtgtggctctcgtagattgtgaatatgaagacacctattggacaacatatgcaatatccggtaaagcgtatgcaataagcactagcgaggctacaaaagtatgtaggatcaaagataaggagcaccatagcaaacaacttcggattgaggtcaataggagtggagcacggcttgcattaagccattctggcctgatttagaatatccaacctatactctcgctgagagagaagtgtgatgaacatgcataccttgaaaatgaagtatgtccaaatctttcataaaaaagtcacgttgaagagctccaatgacgcgacaaaggaaagtcgtggaggaaggagtcaagatgatgtcatccacttagagtaggagaccatgatgaaacacaaacaatgaagtatctgtcttagcctccacaaacccaagatgaagaagaaagctagcggagctactatatcggacatggggagcttgtttcagcctatagagtgtccaattcaagtgatcgaaaaagtctggaaaagaggaatcctcaaacccaaaggttggcgtagtagactgtctctgaaagggtgccatgaagaaaaacattcttcatggctggcaagaagtgcagagaactcttgcatagctggctggggtcagtgagagaagcgttgtaagaccgcatgatgggctacagaggagccacctacaagggcgtcgggaggcgaatgacgagaacacacattgtcatggtgtgctgattttttttctcgaatatgcaggagagctgcatatcattatatttaagaagaagaaaaaagtcgggccaaagcccttacaagccataacactgaggtttaaacccttcaataaacaacaacccttgaacaaaaattagccgtgaggaaggttagctgctaggaaaataagccccttagcccctgccatctcccacaaccttcgctcttctccaacctgctccagaacagcagcgatttactgaagtcggaacggaggccgggacaagtcctagaggcgcaagaggcacgtgtacgaagtggcccatgctgatgacggagtggtcggagttgggccatggtttggtgagggttgtcctggcaacggagttgggccatgttctattgagtcccgtcctagtgacggagctaggccataagaaagccaaggtggggaaacatgcccaagtgatctaggcaaggcatgcctaggtgtcgctgtggaagtagcaggtgccatgccaggccctggtgaggtggttgcaccaagctgtggcgaggtcaggctaggagccgaggcgatcgcgccaagcccaagcgtggagcagtcggccactggaggcctagctgccccatatgtggcctcagtcacatgtggctatgtggaagagtcaccggggcatcatgcagaaggaaaacaacatgatggcactagaggggccatcatagggtcaatggaggagaacaagaactcaaaatccttggaagttggtggagaggagtcctccgaaaagggaaaggacgtctcatcgaagacaacgttcctagtataatggtctggttggaagactgatcaaggtagtagtgacccttatgatgagggcagtattcgaggaaaacacaagagtgagtttgtgagaagcggtggcagaaaggttgtagcatcgatagctgaaaacacgaagatgagtatatgattttggggatccaaagagagtgagatggtgtgtgaagaagttgagtgccgttggtagaatattgaggagcgtaacggtgctaagcgcctcgacccaatatgcaagagagacactagcctgaaatagcaaggaacgaacaacatcattgatggtgcgaagcatgcgtttggctttaccattttggggtgaagtgtaggggcaagacatactaagttggatgtcgtaggggtggaagaaagtgcgggtgcttctgtggttgttgactttgtggccattatggcaccggaatgcctgaatgggaacatcaaacttgaagagaaacttacaaaggtttagaaaccatcaaggttgtgaacctgaaaacacccccccactcactgcaaacttgaaacagtaaaaaagggcgacctagaaagcaagagctgaagcttcaaagcaccagccttgcaccacaaattacactcatccatcttagcttgaagatgaacctgagtgttaggttgagctccctaaaaaacacaggcattcctaggtttctacacctaccaggccatgaggatgataagagagttgagaccttgtcgcagctccttctgtacgtttctgacagccaccttgcaccaagcatcgaaccaggaatttaaaactgaaggtgtcagagctgccaagcctaagtgctaagaggattatatgtcaaacctgccgagtgaagatacacgagatcagaaagtgctaaatcgattccttgtcctggtcacggagagtacatacatccgagtgtggtaaccctcgcttagcaagtcggtccgcggtccagcatctgttgttgattgccaaccatttgaagaaccagcaacacataggcgcctaggtcatccaaattcttttccaaggaccaaactgtatggagcctaggaaacgcaccataggtcgatttgctacgataagtgccagattgtgctagtttccacctgttaagatcaggggcattttgttacagctccacattgtccacctgatcccagagcagaagatattcaaccagcacccgcaatgatagtctgcccttgatatcatgcacccaagtcctgttaaacaaagcttgggcaaccgttctagttctaattgtgcgcttaagaattaatttatggaaggttggcgacacctcttggatcctcttaccatacagtcacccatctgactagaaaaaaaatcaagcctcgtcgccaactatggataccactgccccatcgaacatagtgtgagtattgtgggatacctgaatagggagcccaaaccacgttgttgtcggagaggagagctcgtggcttatgaaacaaaatcaaatgagatctccctatatatctctaatcatatacaagggctggcctgttatatctagcatgtacccataccatatatacacactgtatatggcagtgaaacatatacaaggctcatcctactataccagacacgtacccaaaccatatatatacacatcatatatggcagtctaacaataatctttattcatctccacaagatattttgacctgcaaagctcaggctatgctaggtattttctaggtgctttatttgtgattttcatcagatatatattgcgacctataagttgtgtacataaatttggcttttttattgttgttttgaaacagatagcgtctcagcttattaggtatgagcatgaaggtgattggagtagcgcacttgaatactatgatttacttgtaaggtcaatgccaaaggaacaccttggcactttaactgggtcggtgttgactggaccatctaccgtgtcttctagagcagaagatacaatgttgaactggaaaatgcacaaaggtcttatgagatccttgcagaaaactggatgtagtcatgtgcttgatgtctactgtgaaggtttatctcaccaaaaggggtgtcttcaacaagacgcggagtttattgatatccaagttagtattgcatcttttatatgatagttgcactgtttcgctaaacttctcccataatttgttccatgttttatcgcctgtcttgcagtatgaagctgcttggagggcaggaaattgggatttctcctttttcgttccatattcttcttggtcttcaacccgctctcgaagtagctgtcttttcaatgaaaatttacataggttaataatatccatttactcatattgatcagtgttttttacacttctgggtagaacatgattactttgtttattgaattttttattaactcttactcccttcgttccaaattgtaagtaagtttggctttctgagtctcacagcttttgtacgcacctagatatacattatgtctagatacataatagtttaaaaactatgtatctagaaaaagccagaatgacttgcaatttggaatggaggactatataaaattaacattaagtatactttcgaggacaaagcaaagcatttatatcctgagcattatattgaatataatgttaggtatagtcaatactattagggaatatgtacaagctattatgaaaggatatggacataatctgttagactaggaacgatgtggatatgatctgatacatcatacatcagatctgtatcttctttgtacagtatgcctatatagctatattcatggttgaggttttccctaattctctataaatacttaccgcacaagctcaaggatcttgtagaataaagtaacttaataaaccttgccaaacagttcaaaatagaccaagagtacaagacagccctcttaggaggcctaaaacacaaatacaagaacatatccatggttattaaaacgataaaacgttaaaatgttatgaaccacctttttaacatttaaatgttgaaacgaacgttgaaacgtcttttcagacttgacatagaacttcaaatataaataagtacttgagttcacataccaaatagcataaaaggaaacagatcaagttcaacacaagttcaaccacacaagttacaacttgtatcttttggctgctggggatggaccgcctggaaggcttaggtgttaggaacttagggtttttccatcttttggcccaggaaaggaaaagcccatggcgagtagaacgtcctaaacgcaagtaaaacgccttaaaacgctaagaggacgtttaagcgacatttaaatgcgtgaaacgggcgttctactccattttggtaaaacgttcggacgtttcaactcttaatcacgttttgtcgtttaaacgacgtttaagcgacgttttaataacaatgaacatatccatgaaaccgagccaaggaaaaaactacaccaataaacaacaatcagctgagagggttgctgctaggaaatttagcccctgccatctcccacaaacttctctcttctccaacctgcgccaatacaacaacaatactcgggttgatgtcctcaatgatacattggtttcggtgtttccataaggcccaagcaccaagcgaaactagagagttaatcccaatcttggtttaacccattgtcatttcacttatcttgccccaccaatccagaaagttgttcttgcccaagatgctcggtctttaacgctaagtgaaaactggctcaaggttaaattgaagaagcactctctggggcttgcctcattaaagtgaatcattgcccgtttaagatctagagtttgttgtcggagggccggtagggaggccgcgatggcggctaaaaaatttcagaaaccctaatcgtaaccttctctgttaccatgttactaaccttgggatgaaccattggtaataagtccataaggactatatgatatatataggcagtaggcctgggcctaatgggccttaacaatgctaacacaaagttgttccatatgcatgtccgtttaaggaaaaactttgtggctagattggttgctgacaactaggcctttactggacataacgagaaggcctattttatgaatcaattctactataatcttctgggaggaagtattgatagagattgctctataaatcttaaagatgtgggagttctgacctttgatttgactgatttggatcggcctttcttggagcaagaattttgggaaactgttaaatagctgccttcggataaggcttcgggaccagatgtgtttgtaggaggtttctataaatcttgttgggacattattaaagtggatataatgactgatgtttcagcggtttggcacaggaggtttgcgcagtttgatttgttgaacacaacataaacaatacatgattgatgtttcatagtatatacattgggatactgtgggagtagcatcatctaatgaaatcatattcaaagtttcaaactagaggtgctcgaagtagtgtaagtctctctaaagggtttggtactcccctttttaagagaaatttggggggcatcttcctatgccaaaatttttaggatcatcataaaacaagtgactgttctaatgtaaggcatgtttcttttctttgtagaatcgatcattcgtagggattaagcattgtcctctgggagttatcaccccctttgcatcaatgcacgtgattttaggatttttgcctgttgaacctttttaacactttgaccatgaatacatattacataagaattattgacaattccaagatttgtggagtatttctgaaattgttgtccctaagctccaaaagaatgactttaattcagtagcgattcatttagcttggtggctttgtaaacataggaagacctgtgttttttatggggcatctccaagcatcacaaaagttattgaagatatcaaagaggacgctagactttggggcttggcgaaccttgtggccatagttcagggaaaaggggggaggtcgcttagctgttttgtcctccttgatggatctatttttgtattcctgtttttggctttcgtaaggagggtgttgtatttggtccatttccatttctagacatgggcttttgtttcttgttaatataatgatgcgcatgatattgagtattttgatctctcgtggagttgtggtgttccaatagtgctcggctagatgggctgagtaagaagggctttaactctttggtcgctctgggtgcttggatgctatggaagcatagaaatggtgtggtctttaatggttcctccccaagcctggatgtggccattcggctggccagggaggaagctcttctgtggtccttggctggagctaagggggtttccttcctccaagctcaaagccgtgtgggatagtttttatgttgttattgttgtggtgtctgccagctgacaggcgctctagccctgctctggctaggtggggttttctagtgtgcgtgtgtgtgggtgttttctcttcgtaatattagttttggggtctttccccttttattgttagtacaatgatatgcaattctcctacgtgttggacaaaacaatgatatgcagctctcttgcgtgttcgagaaaaaaaaagaattgttgacaaagtaaactatattttacttggttcgtcatggataaaaaagggcatacctagtgcatgaggctcccatgtgaggggtttctatgggataaacgaggcaacgctttcccctgcatatgcgaagatcctacttcgaacccgcagtctggtgacttagtgagacagtctcaccgttgcaacaggaccgaccttcatctatgtttgaaatatcatattcttatataaattactagtcaaagtgtttgcttgtagaccatgttaatgcccttttttttgaaaaacgcaggaggactgcgttttaaatatatattaagaagagagagacaagggtctaaatagacccaaaaaacaacgcactccctatggagggctgcaggccagtaacactcgtacatgaaaggatccataaacatacacacacacacactccctacagcaacctatgcaggggggcacccaagagggagagccctttggctccaacaatttcccagcctcttctttcctcatctgcatgctccataatcagaggaaggctaggaggccctccataaaaaatgattctattacgatgcttccaaatcatccacgatcctaaaatgatgagggagtcaagaccttcccttaccagaccatttgctgtctctgataccatctcccaccaatccataaaagaaactgcatatggctttggggctaaactatgcagcccaaactttcttagcaggttgtaccagaaaactcttgagaagacacaattcacgagcaagtggttcacggtttcaccttgctcgtcacataaaggacatctgatagggtgattcaatcccctttttgccaagcgatcagctgtccaacatctattatgtgccaccaaccaaatgaaaaaacaacactttggtggagcccaagatctccaaacccttttatagtgcccaaatgtggtagacccatggaaaaaaccaatataagatgactttgcagagtatcttccattcgaagataagctgaaaatgtgtctatcctcagtgttaggctgcagcacaaaatctgcaaggatattccagaggtgtagataatctacaatggctccaactgtaagagccactttgatgtctgcaatccatcgtctgttcaatagggcgtgctgcatagtccttctgttaataattatttttggaataatgctgaataatctgggagcaatatctgagacccttttgccatggatccatttatctgtccaaaacatgatgttggtcccattccccacctcagagatcagcaccttggagaaggaacgggtcgtgctaggaacttggatggacatgctagaccaagggcgtcttgggtcagttttttgcaaccaaagccattgcatgtggagggcccaacagaggttaggaaggctagcaatacccagacctccaagttgcaaaggacgacacacttttccccatgccaccaagtaatgcccccctttcacctcctttctacctcgccagagaaaaccttttcttattttatcaattgcttcaatggccatatgccatatagaccgtcatgctagtgaggacatgctgcactagaattcttcttcctgctctactcatcaggtcggccttccagtttggtaggcggtctgcaattttgtctacaaactgctgagcctgattcctggataatttatgtaaagacaaggggagacccagatatctgcaagcaaaggctgcaatcccaatttcgtcaatagtctcctcggggcatttgatagggtacacatttgatttctgtggattatagcaaaggcctgacgcatcacaaaaagcaagaggatatccagagaagttgaaatgtctatagctgtagggtgcaagaacaacgccacatcatctgcatacatcgagactctgtgaagccttttccttcttgacggttgttggagtaagcccgctccctcagctttggaatacagaaggccaagaacatccatagcaaggataaatagcatcggggagagaggatctccctgcctaagtcctcttctatgcataatcagtttacccgggacaccattgagcaacacctgagtagtggaagagggtaataaaccacagacaatgtctcgccagatatgtccaaaacccatctgctgcattacttcaattaggatgggccaagagacagagtcgaaagcctttgttatgtccaacttgaaaaacattctaggcatgttatgttgatggaacaactttgaggtttgttgcactaacatgaaattatcttggatgaaccttccttttatgaaagcgctttgacttggggaaaccatcgcattcaatctttttgccaaccgattagccaggatcttagtaatctgctttgcaaaactgtgcactaggcttattgggcaaaagtccttaacctgattagtctggtttataaggaagctcactgatggtttcccaaacttcatgctctgagaaaggagtcaagatccgatagtgcatgtcttggcagaccaagggcctctagatcaattgtcctttctctgttcccaagctgaccaatgagagtggagtagaagtcattcaccaccaatcagtatggtttatatggataaggtctccatccaccagtttagtgaccggattcttccttttgcgatgccttgcatgcatgtggaacaactttgagttagcatccccttctttaagccatgtaatccttgatctcagtcttgccatagtgcgcttgaaagaagcaagcagcagggtctgttttttcagtttattcttgagccagaccttagccggggagagggttctaatatcctgcgccatctgaagcgtatgtaacaactcctttgccaaagccaactaagatcgaacatgacccacccgcttctcactccaaccctgcaatcttttagttgtcaccttaagtttcttgtcaagggtcaggaaaggagaattgtcagtttccaccgagtcccatgctgcctggacaggttcatgaaagccttcgattttggtccaaaaggactcgaagtgaaatctacgtttcccaaacatgttatctctaagacccaagatcagggggcagtggtcagagtccagagaagctgcactctggaggaggacatttgggaacattatttcccaatcaactgagctgaacacctgtccagtttaaccaggacaggattatcctgttgattagaccctgtgtatttgcgtccatgtagagggattgccttgagagctaaatcattaatcattcttctaaaccggcccatcatggccctgttgatattggatttatttttgtcagatgccttatagatgaggttgaaatcaccggccaatatccaaggtccctcacatgcaggcatgcagctcttacatctctgatttcctggctgaatcttttcactgtctccctgtggaccatagacacaagtcaaccaccagagatgtcctttgtcattgcaaaattggactgaaatacaatgactgtcaattctatgctgtcctgtataaccaatatgccgcttccaggctacaagcactcccccacttgccccaattgatgggagaaaaacataagcagtgaattatgcaactagcatagaaatgatagatcctctagggacactttgcattttagtttcctaaatgcagatcacatccacctaggaggaaatcacaaattctttcaccgaatcttgtcttacagaagagttcaaacccctcacattccagatcaaaagttttgaaggatccataaaaaagacacaacaaccagaccaccaaagaagaaagatagagctctaatggaaggggatgcttgaaaggaccagccaaaaagagccgccagggcctccacatggatttgtggaaggggatgcttgaaaagcttagcatattcatcaagggcttgaggactaatatcaccagaatcattgatgattggcagggtcttcatgacttttctgacagatctgctaccccagtcttgcatgctgaattccattcctactcccaggtactctcctgcttcgacgaggagcagccagccctaaggatgtcactttcctctgactgggctttagaatcgggagaatttcaattggccttttactgattgtgttgaagaagtccatctttcttgcttcataactcgttagagagtctggtgcctggtcacttagggacatatcatccgaagcaaggaccagaggtccaggaccaggttcaggcagggccaacatgggtggcttagcacctggggctaatttagaatccagagcatccactacccaagttgtcgagcccctttggttgcaagagccatagcacacaactcagcatgttatgaatagcacaaatattgtacgagggcaatagacccaaatatatacactgatacaggatagagaccatgtacaacaaggactctatatgagacccaatacaacatgaacatataatagacatttaacagttcccaggtgattagaatgatgaaacagttaagaacttttgtcatcttaggaacttctgatagcattgccttaccagctaggcaactagtgaaatgagatgtcctgcaatcttcttctgtgagaacaaaagccgactgggtcttttaagtgtatatgtcttttgttttgcttacctttaaaaacctgtttcctaacgtctgatatttgttatttattgtgcatgctccagttgcttaagagctctgcagaacggtgattctgaggagttccatgcaaaactttgtcaaactaagatggtattgttcacagccacttttgtagtcacttttattagtgaaattctgttaatgttattttgaactatttacttgtcctcttctaggatcttgtcttggctttgtcaaacactagcaaggagagcacgaaatacatccactctaccatccttaaattacaggtgatgacttcttaccttatgatggtgtacatgttggtggattagtcaggtgccttatcacttgctttggtaactgcagattctagatcatgctactatggtttgggacctgcgttggaaccttaatcccaatcaaacttcaaaatctcctgtaaccaaggaattttctcacatatctactgtccctaaagggatacaggttctgcacacatctctcttaccacttgtgtcattctgtttcagatgcatgcaatttaggaactttggatctgtgtgaatttgcattatattttgtattgatgtattgagaatctggagaagggacatatattcagttaggcataacagttatgttccttgcaattttttctattgattcattctcattagttgcttaatttgtatgctcaaaatgttgttcatttggccaaataccactacaacacgttttcgtttgtagaaagaaatatgttgtataaatgcacaatagtgcagagtcttttattttgtagtacaacaaagtcttttaatctcaagcaagttggggtaggctagagttgagacccaaccgaaaccaaccacaagtcaaggttgaggcacatggatgattgttttccatgcactcctattcaaagttaaatctgagtatgttctagcgtttcaagtctcttagggtatattccatgctttcaagtctcctactgcctcttcaatgtcaactttggcttttttctacctcttgtcccattgttatcacgccttaggatcccactacgcaccggtctgggacaagtttttctttaattggtgctgcctctagcctatcacgtctatcatcatttcacacacaatcccttgtatgaccacaaatccaaagcaacgtatgcatttctgcaacattgatctactgaacatgtcgtctttttaggtcaatattctgcaccatacaacgtagcagatctaatcattgtcctataaaactttccttttagcttttgtggtatcctcttgtcatatacaatgttagatgcttgaagcagcttgatctattagcttttgtggtatcctcttgtcatatacaatgccagatgctcgaagccgcttgatctattcttctttatttctatggcaaacatctacattgatatctcgtctctccgtagcatttatcctaaattctgataggtgtccttcataggactattaccttcaaaactaacatttcctcatgtgtagtagtgcggaagttgcatctcatatatattcggttttagttctaccgagtctaaaacctttggactctagatcttacaccacaactctagttgtctacatactcatgcttgactttcatcaactagcagtacattgtccgcaaaaaacatacatcaaggagtatctccttgtatgtcccatttgaccttatccatcaccaaggcaaaaagatagggctcaaagttgatccttgatgtactcctattctaatcgagaactcatctatatttctatcacttgttcaaacactagccacaacattgttatatatatccttagtgggcgacaaatattcgagaatgaaggtagtacttcgttgtccatagcccaccacataatattccttggtattttgtcataaacctttttcaagtcaatgaaaaccatatgtaggtctttcttgcgctccctatatcgctcaatcacttattaagaaaataaattctatggttgaccatctatgcatgaaaccaaattggttcatagagatactcgttattcctctcagacgatgctcaataactctctcccatagcttcatagtatggctcatcaacttaattctttggaatttagtacatctttgaatgccacttgttcttgtagatcagtaccaatatattttccactcgtttggcattttgttcgatcggaagatatggttgaacaacttggctagccatactatagctatgtcactgaggcatggagatgcctcaatttgagtaccatcagggttgtcgccttacccccgtacatcctttttaatgcttatactgcgcacagagcgtcgcttggtcagcaaaagagtcatccaactgaaagtttgtgccctcgttctccctgttggatagaatagaaaccccaattgggccaaccctagagggtggctatatcatattcatacatgggcctcatgggccccatatactctaacaccccccgcagtctaaacttccgtcgcagcggacttcacagactggactcgaagagaagaagtacaacacaccataggatccccccacagactcaactagccactactgatgttgaggctggagcgaaactcgacgaaggtcgaggacggaagacccttggtgaagatgtcagcaaactgggaggtggtcggcacgtggagtacccgaacatcgccgacggcgacgcgatctcggacgaagtgaagatcgatctccacatgcttggtccgctggtgctgcaccgggttggtggagagctagacggcgctgacgttgtcgcagtagaccaacgtgctcctggagaggggactatggagctcggcgaggagctggcggagccacgcagcctccgccacgccgttggccacgacacggtacttcgcctcggcgctcgagcgggagacgaccggttggcgcttcgacgactaggacaccagattgccgcctaagaagacggcgtagtcggaggtggagcgccgagtgtccgggcacccggcccagtcagcgtcggtgtagacgaccagctcggaggcggtggaccggtgaagaagcagcccgtagtcgacggtgcctcggaggtagcggaggaggcgcttaagagccgcgaggtggggctcccgggggtcgtgcatatggagacagacctgctgcacggcgtaggagatgtccggcctgatgaaggtgaggtactgaagggcaccagcaagactcctgtacccggtggggtcctcgactgggtcactctcgacctcagagagcttcgcatgcgtgtcgactggggtggagcagggcttgcagtcaatcatcttggctcgctctagaatgtcaagaatgtactgccgctggtagagaaggagtcctgaggggcgaggctcagcagtgacccccaagaaatggtgaagcacacccaaatccttgaccggaaactctcgctgaagcacgtcgatgaggcggcgaagaagtgactgactggaggcggtgaggacgatgtcatccacgtagagaagcaagtagacagtctctgctccatgatggtgggcgaacagagacgtgtctgacttggcctccacgaagcccagtgtcaccagaaacgtagccagtctggagtgccacgctcgggggggcctgcttgaggccgtagagggacctgttcagccggcagaccatgtcagggcgagaggagtccacgaaccccaccggctgacagcagtagacggtctcggtgagggcgccgtgcaggatggcgttcttgacatcgagctggtggactggccaggagcgagcaagggccagtgagagcaccgtgcggacggtggccggcttcacaactgggctgaaggtctcatcgtagtcgacttcggggcgctgagtgaagccccgaagaacccaacgagccttgtaccgctccagggtaccatcggcccgctgcttgtgcgtccagatccacttgccggtgacgacgttggcgccgggcggacggggcaccagatcccacgtctggttggtgacgagagccgcgtactcctccatcgcccgacgccagtgggggttcagcagggcagcgcagacggaggagggtaccggagaaacctgcgagtccccggacgtggccgccaggaaacggggtggcaaggtaccagccgcgtgccgcgtcaccatcgggtggacgtgccgcgggtcgcggtgaaggagcggcgagtggtacaccggcgtctcgacacgtgccgctagtggccgcggaggaggtgtaggtgtccctggcggggactgggccaccgggggcgccgtcggaggagaggtcaccggtggggacgatggcggtggtggcgacggtggcggcggtggtgcgaaccccggcggcggtagccggcgctggtagatgcgcaccggctgggcgaagcgtgccggaggggccggcggcggcggtcccgtggccggtgacgtgggcaccgggggctggcgttggtagcccgcaggcagtgcaggcccgctcggcccaggggcagtcgaagacggggccccgcggtgaggcgacaccaccgtaggcgacaccaccggacccgggcaaggcaccaaaccgggagtagtaccgacaggcggcgagcgagtacctgcagagagaggaagtataggtggctcgaccaccgcatcagtcggaaaaagagtgaagaggtcaaggtcagggtcggaggagggtggtgtggtggtggcggagtagggaaacacagactcatcaaacaccacatggcgagagatgaggacccgacgagaggagaggtcaaagcattggtagcccttgtggtccggggagtacccgagaaacacacagagggtggaacggggtgctagcttgtgaggagcagtggcagcggtgttcgggtagcaagcacacccgaagacacgtagatggtcatagcgcggaggggtaccgaagaatgcctggtgaggagtgggagccgggcacgcagtggaagggagacggttgaggaggtaggtagaggtgtggaggccctcggcccagaagcgtgccggtaggtgcgcctgaagaagaagagtgcggatggtgtcgttggtcgtgcggatcatgcgctcagccttgccgttctgggaggaggtatacgggcaagacatccgcaactgcatcccatgggagagaaagaagtcacgggaggtggagttatcgaactcccgaccattgtcacactgaacggccttaatggtgaggccgaactgagtagtcacccaggcgaagaagtggcggagggcgggaaaagtctcagacttggcacgcaaaggaaaagtccacacataatgagaaaaatcatcaagcaccacaagatagtatttgtagcctgacatactggtaataggtgaagtccacaaatcgcagtgtacaagttcaaatgcatgagtagcatgcgaggaagaagaagaaaaaggaagacgaacatggcggcctaactggcacgcatgacaaagatgccatcatgtgatctagtacatgggatagtggcacgacgagtaagctgcatcaaggcatcgcgtccggggtgaccaaggcgacgatgccatgtagtagaaggtgtggtggcagcaaaaccagcagctgtgtcaggcgacgaagacgaagaagaggtggcatgcgaaagccgaagggtgtagagggggccggtgctgtcacatctgaggagggggcgccgagtagccgagtccttcacagtaagaccagaagagtcaaactcgacagaacaagaattatcagtggtaaaacggtgaatagaaagaagattgtggaccaaagaaggagcgacgagaacatcgggaatgcgaaaagagcttggagtgccggcgacacccacagatgtgacatgaagacacaagccattcaccaccatgatgaacgacggaagagaggaaggagggcgaacagaagtgactataccatgatcgggagtgatgtggtaggtagcaccggtgtccgcgatccactcgggacccatcgtcggagtgatgtggtaggtagcaccggtgtaccatgatcgggagtgatgtggtaggtagcaccggtgtctggaaggaagcagccagggcggccgcgtcccaaccaatcggcccagacggtggagcagccggcgacgtgggccacgacgaagcggcaggggttgaggtccagggcgacggagaggcggaagcgaaccccggcggcgaggtgaaccccggctgcgcaccggcaaacatggccgccggaggacgagcctcagaaccagacccctggaacggccacatggagatgcgccctgaccacgggtggtggaaaactgggccaaggcgcaccctgctggggtcccgccggcggagcgtggccacaggcaccactgccagcgctgccccccagaaccgccaccgccaccgcgtccaccacggcgacgacggcttccaccgcccccgcctctaccacctcgggacccgccgcccccacttggcccaggtggacgggttggggtggtagccaccagcgcagtcgaggaggacgaggaccccgggccggagatcgatgcaacctgagcacccagagtgatctcctccagagcaaggtcgtcgcggacctggaggaaggtggggaaggggcgctggcgcatgatcaacgaccgggggtgggtatagcgatcactgaggccgcggacctggaggaaggtggggaaggggcgctggcgcatgatcaacgaccgggggtgggtatagcgatcactgaggcctcgcccgccacaacagcaagggcagaggcgagagtccctaccccccacgccggcctgagcgcagggtaggcggcggcggcgagagcggcaggggatgctgcgcgtgcccaggaggaagaggtgaggggaggaaacatttggagataggaggggggaggaggaggctactggtcgccggccatggagggggcggcggcggttggcggcgcgacggtgttggggcctgcaggggcacgactgagcagtcgggttcctggcgtcctggcgcgtgggatgcacgtcggggcggcgtcgggtccggccggatgagcaggggcagggcgcttggtgcagcggaggctaagacggcggcgctgcttctccgtgacgggcgcggcaaccggagtcgcggtgcggcctcgcgtcctgggcgctgcctgcgcgcggctgggcggcccgacaggcgtggcgcggcgcggccagtgcgcaggggcgggcgacctgggagcgcgcggggcagggcgcggcgcgcctggccggcggcgacggctggtgggaggaaaaagaaaacctagctttgataccatgttggatagaatagaaaccccaattgggccaaccctagagggtggctatatcatattcatacatgggtctcatgggccccatatactctaacactcccaattgaacaatttgccaaaagactcataccaacaatgtgtaatttcatcctccttcaccaagaggtgttctgtttcatccgtaatgcacgcaactgaaagtcttttattctataccattcttaattatttttgtttcccttgttggctaatatcccatttttctgtgcagttggagttgttggataaagagtggaacttaattatgttccaagcagaacggaatcttgatctatttgaaccttttctggcatttaggcgtgccctccttaagattttaggttgtgaagaacatcttgtaaaacatttatttcaatctgcttctgcgctccggaaggtggttgccttgttttcagttgtgaccctgtttcacactatattccttttttgactgtgattattttcttgtattcagggattaaggttttctttggcagcggcagctttatatgaactcaaagaactttgttttcacagagatgagagcactatgacaaatacctatttgcttgcacgggtatataccttacaattgagttatccaactgttgattttaggaagaagtctattttttgccaacgaactatcacccaagtcctattttggccatgaaactccaaaattgatatatttggccattgagctatcaaaaccacacaactttctccataaggctggtttaaaaggtggctttgcatatatatgttttttaaagataatggatgtagagacctaccttgaattgaatggagccgttagagcaactccaatagttatgtaaattttagctctctaaatcacatatttaagaagttgttaaatgacttttggagtaaaaaaatgtgagttctccaatagttctctaaatatatgttgtaattttgttttgtatttatccacataaaaaataagtcacaaaaactatataatgcagtcaacatttttgtttagggagttgttaaatggttgccaaatgtagagagaaatgaggttagatgacaagttgttaaatttagaaagttcatttagagaactgttggagaatagttttcatgttaactacctaaattattgatttaggaagtcttttagagaactactggagttactcttagcctctccacccctgtctgcaatccccgccacgctcacggcagtcgggagtagttccgccggcggcggccgcccaaaccatcccctacaccgaccacctcaccggcggccccaccccactccgcatcctaccccctcaaatccattgtcttcgtatctctctagatcctggttgtccgcgcctccattaatcacaggtgggtgagcttcgctcctatcctgccacgccctgccaaccaccagcgcctaacgtcttccagactgtgtagccatccatgcacgcctacacctcggcacctcccctcccatcgagccatcgtctcaagttattatgacgcaatgtaactaccgaattttaaactagaacgtcagggggctcaacagcagcttcaagcacgacgtggttagcgatctcgttcgtgacaccggctccaccattgtttgccttcaggagaccaagttacataatgttgatgtgttggtggttagccgtattattgggcagaactttgctaactctttcgctgttcttctagcatctcaaactagaggcggcgtcctcctggccacaaatgtgaatttctttgagatctctagcatccagctctctacgcatactataattgccaccttgacaatgcgtgcagatgcgactcggtggaaaatcacggtagtgtatggcccccaaagagatgatgacaagctagagttcctccaggagctcaggaacatcaacccttcggctcatggccactatctcatctatcaagcgcaagataaaaataattcaaaccttaatcgtcacctgatgaactccttcaaggcaaccattgatgatctggggctcaaggaaattaagctgaacgggcgtcgttacacatggagtaatgaacaacacaatccaactctgacgagaattgatagtctcctttgcactctggagtgggagctgatattcccaacttgcttctttcactcgcttccatccctcatgtcagaccatatgcctctcttgcttctgggtgagctagaacatttcagcaaccccttcttacactttgaaaattactggacaaaaatggacggctcactccaagtggtgtaggatgactgggacagaccagtagccacttcactccccatcaaacgtttgcatatcaagctggccagggtggccaaaaaccttaagaggtggaaaaaggaaaataaggaaatacaaggctcctacagttggagatggcacaggagttccaacatgccttgaaaaaggcaaccgtaaccatctgggcccggggccttgtcagaagacatggggaagatggtgcatcgtatttcatcttgagataatggcatctccagctgctataggtctctcgatgtgtatcctagtgcctgacaatctaggaccgtggttcttgaccacattgcccaggtattcactgaaatattcatcggcaaccttctctttctcttgttgggagaagaccattcccccctcattttgtaaacagaggatatagtttttccaactccgtgcatttgctttcaagtggaaaaactttgtgttggcgtctccacaacggatgtatgtgagcctagacctttgtcgcattctagatttctcaatgacggccaatcctgtgcttcggagtttgaggcgacgcctaagttccatttcctaccatgtcaggggtgcgccagggagaccccctactcataaacctgaacaagagctccatacacccgattcgttgtgaggacgttgatctagagcatgtccttgaaccgttcaatggggtcagagaatccttcccatgctactacctaaaatgtcgtttctggcatgacccttggcttgatggcgagacgcctcgacacttagctcctaggctgtttgcgctgtctagaaggaagaacatattagtctacacggagctccgggagaacaactgatcaatgcactgcgaggccgaatcaccactgctacccagttagtggagtttgggcctttccggtttggtcttatctggaaaacacatgctgaaaataggtgcaaggtatttgcatgaactatggcaagggagaaaattcacaccgcagacaactcacacaaaaggggctggtcatagcatgaccattgtgcattatgtaatgggtcgcttgagacatgtatccatttggctctatgttgcccttttgccaaagcagtatggaacctaactctaacttgggtgcatttcgacgcaaatctaatcctatcgatgggtgtgcctacccatctgtccctgtggtgggaagatgcccaagcaaagattccaaaaaatgatagaaggtgttttaatggggtggtgatataacactatttggaacatttcgaaagaacgaaatagaaggatcttcaccagcaccttcgaaacaacagcacaggttgcctctatcttgggaagtgtagtatttggaaaaaaaagtttttgtgctttgctctctcatgtacctgggtgcactgtaatttctaacttgtatatacactcttttcctatcttaattgaaatgcagagctcctgccattttgtttcaaaaaaaaaagataatggaaatatgattaaatctataaaaactcataactaatttgtttgattttgatagtttaatggccaaagatattcggttttggagtttgatggccaactacccgtgtattgctgtggaaattttgtgatgttatataggaaatgcattcatggtgtaagatattatggatctgaaataattaatgagcggtagagaattcattaggatatcaatcaacatagaatcccctacttaattattattacattaataagagttttactttttatcaattaaaagctactgtcgtatagtagtttcattgctgaggcatttcatcaagcatatgctatgtacatgagaaagtactgttgactatgaattgtatgtctgaaaaacaattttttgtgttaataggaaacccttaggagggagggagagaatacaaaaaagtaatgcttgtttgacacggacgacagtgttagccattgacctgagcgacgatgatgatgaattgttgtcgctaaatcctgaccggattggtgcaacaggaatattgccattgtctcatgggctcaatggactatctagaagtcggtcgtccaatgtttcaaagtggcccaatgggtcgtgtattgtacataagtattagcagatagaattagttaggattacttatcttctagtgtgtacagactataaaatgtacaattctcatgaataatccgtgttatatcttaggtgtgtgtgttcccaagcagcgtgtcttcctcatatcttaggtgcatcaccacccctttctccgggtctttgaagttaagcgtcatgcttccctaatgtggtctctactctctagtaggtaccctaatgtggtctctagcaggtcgcattagggtcgtgtcgtgcaccgccttactcttgtagatcttgtactaagtgaggttgttagcaagatctgctagttatcctgtgtagtatcaatctactgtttcttttacgcattatgttatagattgatattatgcggccagatgtatattgttgccgggttgctatattccacgacatgtgatgcaacacgtgcatatggccactcaagagatcacatgacttagatgcgccatttgttctagatagacttccttggaggtcctgatcgatgttcgtgcttgtgggcattgactcagttacggatgtttctagtgccgtctatacgatatatagtgcaattaattacaagcagcacttttgattattctgtgctaacaatagtgcaacatgtttggttttggaaatattccaatctgagctttatttgagctgatatagtcgctggtttactaatctgcctttcctaatttcagtttttgcttaagcaataacttagcctgaagacaaaagttgatatgctttcagttgccatgtttgtgcttataaaacggctgtttgtagcctatgaccaattggtgttcatgttctgataagtctacatttgctctccagcttgaagacgctaaattgctcagagctcaagggcagcatgatatggctattagtcttggaaaatacatactacagaagctttctgacaagaaaaacctgtcagatgtctatcgattagttggcaagtggctggctgaaacaagatcaagcaagtaatcattcacacttggtaccttgtattttttctgtcatgaattacttccactttgtcacatgtaatactgctattgttcatgatggttactctgtagctcaagaactatcattgaggactatttaagaccttctatagatctctctgaatttgagaagagtacagataaaaggtacatgtccaggcagtgtcgaacacatttccatctagcacattatacatatagtttgttcagaagctatgaggaaagactctcatctaacgaatggcaagcagctctgcgattaaggaaatacaaggtgacattattatggcaattccaatcaatatttgacagaaactgtagttcttttaccagaagttctatttaatgcagactagggagttggagatactgattaaaagactgagaagttcatctaaggcaagtagatgactatagcttttcatgtttctgaattcccaatccttctgttcttggtgctaatctttcaattgttcagggtgtgaagactgattactcagtaaaaatccaagagttacagaaacaacttgcacttgacagagaagaagcagagaaaatacaggtgtgcacatttgtttacccaagcacaatgtgtatatcaaatttacacttctatggcctctgaataaatataataatgtcactttctgttttttaatcatgtttaccttgtcactccatgttgaatgctgtatttccaactcaagtgtaacatatacatgcactatgcatgagtgaatatatgattagtaatctcgctcaaacatctaaatgttgaaatttgtgcatttccatttgtggaaattccttgatatggatatcatttcactgttctaaaagtttatatcaaaacatagatctattaaatgctttgtcgtacacacgcttaatttaagtgtcaaacaaaagagtaaggtggattccatgcatcttgcctgacagcaatgttggaatataatataaataaattgttcatctcttcctatcagattaagcttttgtgttgtactggttggtgcatgcaacttaatgtggtatcagagctagatgttatgggttcgaatcatgactaacacaattaaaataaaataattgttgttcgctcatattcaacgtctgagacccaaaagaaaggctcgacataagggagagtgttggaatatattataagtgttttgcccacgttttcctatcagcttaagcttttgagttggactagttggtgcatgcttttaggtttagggtttatggtttaagcttttgggttgaactagttaccacattccttgaaatgtattgtaatttatgaagcattgtgtcttgcagtttttataaataaggtgcagccatgcgacttccataggggcaccaaattctcactcatttatgtatcttttgttagcagctatatttggtatgaatcttgtcttgttaggaaggtcccttgggtcagggaatggacggctggacaagcatgttaccttatgcgcctccctttgttttggttagttgattgtattaggcaaggatctccctaattggcatatttcctatgcttgtattaggcaaggatctccctgattgggcagtttcctatcccagtggacatccttgctgttagacaacatatttccttccatgtttatgaggtttccttctttattaggtgttgactgattgcccctaattaggtgatacccttccctatcagacattggttgattgcccctgattagtgctaataagtgattctttcctatatttttgctccctacttagtgtgagatcttcctgatagactccctgatcattgtttctatagatcaggtggagcacaatctggtagaggtctatattgtaatcctgctactcagtccaatacaacacaaaatattccacgctatcatggtatcacaagactctgacctatcacttccgctaaactcttccctgcctacgctgcctgtcgttgcctgtgttgcaccaccatggcctctgtagagcctcgctcgtcgccgacgcggacgcggcgccggagacaactcgccaggccctggtcgctgccgctgatgcagcagccaaggcagtcgccgccgcctaagactgggtccgtgccactcaggacgccctcgacgaagaacgccaggccgctcggaccttgagcgcgttgcggccatcgcccacaacgccgccttcccaccaccctcgggcggcgtcccgtacaacgacgccggtgttgttgaagacccgactacaaggccgccctcatcgccaacattcacgcgcaggcggcgagtatccagaacatgtgttcccttgtgcccgtgcttttggatatcctttctccccactacaatcgttggcgcgatctagttcggctcacccacgagcggtacgccctcaccgaccatgtcctctctgacatctgcctcgctatgccatcctggcgacgcatgaatgtcgtcgtgttgtcctgggtgctggccacactccctgagctgatgagtctgctcgcacctctggtggcacttcacgccgcgcctgcatggccatcgaggagcaattcctcggtaatcgcaaagcttgcacacttcgcctcgacgccgagttccgtgttttcatgcagggcgatctctccgtcggtgattattgttgcaagatgaagggcatggccaaggcccttggtgaggtcatccacgatcgtacccttgtcctaaacgtgttgcgtgccaacaatgtcagtgttgtctacttgtccactaacccggttcagcatcagcgtaccaagcatatcgagattgatctccacttcgtccgcgagtgtggtgccattggtgatgttcgtgtcttcatgtcccaacgacgtctcagtttgcggacatcttcaccaagggcttgcccacttctgtcttctccgagtttcgctccagtcttaacctctgcgccatcgacgattcgactgcgaggggggtgtagatagcctatttccttccatgtttaggaggtttccgtccctaattaggtgataccgtaccctatcaggcgttggctgattgcctctgattaggttctaatgggtgattctttcctatatggatgtttcctatttagtgtgagatctccctgattgactccctgatcattgtttgtataaatcaggtggagcacaatctggtagaggtctatatattgaaatcctgctactcagtgcaatacaacacacagtattccacgctatcagttgcctatatgtacccgagccttgctctcattaatcaatcatccaattcccctacttcactgtctcatatctttgacttagagaagaaactgcccaaaaacaaaaacagttctcgtagagggagcacatttatgtattttgatcaaaataagaacttttaatttaaaattgagttaaatgcatgagtgacccatgtacttgttaagggatgttacttaggtccgtgaactttaaaaattcatttctaggtcattaaacttgttaaatggcatactgcaatggtggtatggtccaaaaatggacatgtgatgcaccattattacaagtttagggatgtgtggtccatcacttaacagattcaaggacctaaaatgcattttcaaagttttggacctaagtggtatcccttgacaagttcaggggccatcgatgcatttaactttttagtatttattgtttagttgtatttgctaagagttcttcaacatatcctagttattgtgtccaatcaatttgtattttcatcttttcttgacatgttttctcttattaggatgatcacgataatttcttaaatctagcacttcaaggctaccaacgttccattgttgttggtggcaaatatgacctacaagtggtatgtgaattgtatttgggtatccatattccatgcaaatcttgctaactgttgctacacaatttttttttgtgtcaagccctattatatttttgttgggagttcattttatttacattacattaacatttgatttttcaggtttttcggttggtctcgttgtggtttagtcttttctcaagggatcaagttgtgaaagcaatgttgaaaaccacaaaagaggttttcctttttactttcatttctggattgcattggtacttctatcatgttaaagtagttagttgagagcaattagaggtcatgtaaatagtttatgcggccaaaatactaaatgggagggtcaaaaggcaaaggaggtggacaatagcggctttaagctttggtacatagggacagttgctaatagaaatggaggagttttgattgataagagcctcataaacagtgtggtggatgtgagaaagaaagcatataagattatcttagtcaagcttgtcatgccccctccgcccagagtaggacacgatgaaagcggttcatggagatttgggtatggtagtagggaccaagagagaatcttggactttgcgatagcttttgacttgttgatatccaagccaacacttcttttaggaagagagaatcccatttagtgacctatagtagtggctaacactcaagttaggttgactttgtcctcacaagaagataggattaacgagcatgtttggattgtgaggtgatacctaaggagtgtgttgtctctcaacataagcttgtggtggcgaacatagtgggttggatacaaggtgtaggcccaataggaacaatagactctaacccttagccacaatacatgactatgaagcttcagaagtttccgaagccaacacgtctcggctacaccattagccaaaacacaatattcggtcttcgcactcgagcggaggacgactggctgccgcttcgacgttaaggagatgaggttgttgcctaggaagttgacgtagccaaaagtagaatgacgtgtggccaagcaacccacccccagtcagtgtcgaggtaggtgatgagtactaatgttgaggagcatcggagaaggtcgtagtctagggtccgtcggaggtagcggaggatccgcttcacagaggtgaggtgccgctcctagagatcatgcatatataggctcacatgctgaacaatgtaggagatattcggcctggtgaaagtgaggtactggagagcgccaacgaggctctggtacatagtggggtcacttacagcctgtgtatccaccagcagcttgcaatctggcaagctagctcgctcaagtagatccaaagtgcacacctactgatgaagaaacatgtcgtgggagtggtgctcagcggcattgtaatgaagttaacctagatccttcatagaaaactcccatgcaagacagtgatggtccgctgcaagatggtagggccagaggccgtgagaaaaatgttgtcgacctgcagaattaggtatacaatgtcaccaccgtggcgatagatgaagagtggtgtgtccgacttggcctcgacaaggcatagggagactaagaaggaatcaaagcaattgtaccgagcatgaggttcctgcttcagaccatacaacgacttgtgaagcttgcagatcatgtccggatgagtagaatccacgaaatcagtcggttaatagcaatacactgtttcagtttgagggccagaggctgcaagatggtagggccagaggcaatgaaatgacagattgagtttaagttccatatattaatcatgtgagtgtccgagccgctcatgaccgtgagcacggctagtgtaccagttttacactctgcagaggttgcgcatctttacccacaagtcatgttacccagttgccacggagttgatcagaccccatacacctctaccaaggaagcgaggcagggtaccactacgaggcctttacaaagttccactagcttcagactacccgctacagtttataggaagctccagcgcagggttcttgcctgaccgccatcgcagcaaaatcagaccaaggacctccctacactgaccactcccctactgcccttgcccctttcgggtaaggtagccctccactagctttcctagttaatcagccaagggcgtcccattaaacccttgtggtagcactgttttcccgggtggttctccatgttcccattaacataatgatcttatcatgaatataaaataatgaacagataataacaagtgtaatcatgaggagtaaatatctctatacccaaatccacataaagcaatagcatgaactacccaaaactttagtagtaaaaccaggggtgaaacaaggtataaagatagtcaaaatctagggtatcctattgggtcccatcaaaattaacctatgcagatcattatgaataataagaacatgaatgagtaaaagaagtgatcaagggcacaacttgccttccacgagctcctgctcagcagtctctacttgctgaacctcagaatcctgtgtagcctgcccgtctactcgcatcaacacaatacatacatagtatagcacaaattaacatcacatcaaacatgcaaaataaaatatacagtaataaactagacattaaaataagatcacaggaactggaatcattaaatttggagttatagatcttaagttatggattttctaatgttttatgtgcttaatacaagattaggtgaaagaataattttaatgtgtttgtcatgccagaacagaggcactaatgggtagacaatattattacaaaaatttaggaactggaatgaaccaatttggaattagtatgaattttctatggattaaacaaattctagccattatttttatattaaaaatccattttctatttatttccctggattttctatttactggactgggcctcaataacagaaaacagcaggggtctcggtgtaagtgtttccaagacacagggaaccatccttgtggatggcgggttattttattagaaccagagggtttcaagtgtaaatatgccagcccgaaggggtacggaatggatctggccgttggatcaacagccgatgccccggattagatcctgcgcattataaattcgcggacaacgtagaaccgcccaatcccgatccaacgccccagattttattaggtttcgactcaccatgaccgtccgattcagactgagcggtcagattttccccttagcgaaaggttatttctaatctaatcgcgaccgttgaaggtgaaattggagggtttctaggatgttgtggctaacgcatggagttcgattcccgcaggccagtgccctcttgttagtctttccaagaaattacaagctacggcaaaggctttgcaacgttggagtgataataaagtgggggatttaaaactacaacttgaaatggctcaggagctccttcataggctggagatggctcatgacagcaggactatctctaagtgaggattggttaaggcgtacccttaagaagcacatcttggtgctctcctccttgtcgagatctatagcccgtcttcggtccagaattaattggttgaaagaaggggacgctcatacttctctgttccatgctcaggctagactaagaaagaagaagaattttattggttcattatctacaagtgaagggcttattttgacatcacatgaggataaggctgatgatttgttccatttctatgatggcttgctcgggactgctttggggagagaaaactctcttaatcttgatgcccttgggatgccttctttcaatctaaatgagttggatgtgcctttctcagatgaagaagtttggggcactataaaatctatgtcgtcggataaagctccgggcccggatggtttcaccggtcgtttctacaaggcttgttgggtaacaatcaaagctgatgttatggcagcgatctcttgtgtttgggctcgaaaatttagaaacatggggctgctcaattcagcgtttatcactcttttgcctaaggttgagggtgcagcccaagtgaaagattttcgtccaatcagccttgtccatagcttcacgaagttagtaacaaagatgatggccaacagattggctcggcatttgaatgatatggtttctcctaatcaaacaacgtttattaagaaaagatttatcttagacagtttcatgctagtgcagcacactgcaaggtttcttcatcgtcaaaggcaagcccgcattcttttcaaactcgacatttctaaggcttttgattcggtctcttgggctttcttgctggaagtcctgcagaagttgggttttgggcagatctggcgtgacatcatttgtgggctgttagcctcttcttcgacgagaattttattaaatggtgttcccggggactacattgctcaccagcggggtcttcggcatgggggccctttatctccaatgcttttgatcttagtcatggacactctcaacttgctaatccagagggcctctgatgaagggctgcttcactctctttccacgaatagtttgcagcaccgtttctctttgtacgcggatgatgcggtggttttcctcaagccggtgccctcagacataattctgattctggaaatccttaggattttttgggatgcgtccggtctgaagaccaatgttcagaagagtaatgtttttcctattcgatgttctgaggcggatcttgcttgtgttcaggagctccttccatgttccatttcggagtttccctgtcagtaccttggccacccgctttctcttggaaagcttaggagaagtcaaattcaagcaattgttgataaaactgcagcctagttacctgggtggaaagctgatctgatgacaaaagctggtagagtcatttatgttcaatttgtgatgacatcaagaatgatttatgctgctctagcgctggacatccctccttgggctgttaaagcaattgataagattagacgaggctttctgtggagagggaggaaggaggtgaatggtggccattgtctgctgacttggcccaaagtcactagacccaaggacctggggggtctgggcataagtgaccttcggatcatgagctgggcgctgcgggctaggtggccttggctgcaaaaatctgataggactaagccatggtcggactttcagattcaaacttgcgacattgtgcaaagcttggtggctgcggctgttatcactcatttgggagatgggtctgatactcttttttggaaggattgttggttgaatggcaaatgtattaaggaggtggcacctgctgtcttgggtatggtgcccaagcgcattgcttctaggcgcctggtcaaagacgccttgcctgatctcaattggttggctgatctgaggagggctatttctgttacagcccttgctaatctcatggacctttgtgacatgctagaggggatggttcttcagccggatgttcccgatgtgcatgcctggaggttcagtgaatcgggtgaatactcgactaggtcggcttacaggactttgcttcttggctctgttagctttgagcctgctgaacgcatttggaaatcctgggctctaggaaagtgtaaattcttcctttggcttgtggagcacgatagatgttgggcggctgacagacttgctaagcgtggcctggatcacccggagtcttgccctttatgcgaccagatggaagaaactatcaaccatttgctggttcagtgcagttttgcaaaacagttttggttcagccttctgcagacaggtggtttccaggagctctgcccttcccatgttgacgtctgttttgaaacctggtggaggaatagtgctgccagggtgggcaaacctttatccaagggattcaattctctagtcattttgggtgcatggtctttgtggaaacatagaaataggtgtgtttttgataattgtaaccctagcgttgcggtggtgttggcagctgcaagggaggagttaatgggttggcgtatggctggagccaaagcgctctctttcttccatttagaagaggtgtcttaggtgtcttagttgttcggggtgtgttttggttttggtttaccaaatgtaacacctttgtaccggggttttttctccccattttcttcttcttcttaatacaaaaatacgcagctctcctgcgtattcaagaaaaaaatatatatattacatgaaatgcagtacaatacaatagcaccgaggtcgcgacagctgacttggctacgcaagggtggagtgggccatagcaacctcgtcatgtggggcgcgatcagtgaagaggccagggctggacacctagccacattgggcacaacagtcgtggcggcagcagcgccatagggcgacgcagccccatcgattgaaagtcgcctagacggggtgataggcaaaaacctgaaaattataaactttgaacacacacttcacctgggaatagcgttagaaatagacaatagtgaattgggagtgtggaagatagttcttgctatgagttgcttaatcaatgtggataactttgggagcaaactcaaaccaatgtgagcaatagaacttttagagagaggagagggaagaaacaaatcgaatggtgatgatcaacacaagtggacacggcgatttgtttcccgaggttcggttctaaagaacctactccctgttgaggaggccacaaaggtcgggtctatttcaactctttccctctctcaatcggtcacttagactagtcaagtgcttcttcttaatatcatgggtcactaagaccccgcaaggatcaccacacaattaggtgtctcttgcttgctttacaaaacacttggaaagattagaaagagaagaagaaagtaatcaagcaacaaaggcaacaaaagaaacacaaatcaccctcaaggcactaaacactttagatcacttgacttgattttggcacttgcagaggatttgaggctttggttgtgtctttgtagtgtattctttgctcttgtattgaatgaagagagtcggatgcttggatggctttaatggtggtggttggagggtatttatagccccaaccactattctagtcgttggttgactgctctatcgatgggcacaccggacagtccagtggtgcaccggacactgttcactgtcctatgtgtgccacgtcagccaaccgttggggtttggagctgttgaccgttgaagacttctgtccttttggtgcaccggacagtcctgtggcacaacagacagttcggtgcgacctgtcgtcgcagactgtcttctgacttctggcgctgcagactgcgggtgcagtcccgcagtcgaccgttgcacagagagctcaccggatagtccggtggcacaccggatagttcggtggcgcaccggacaaaccggtgattttgtggacgagcgccgagaaaacccgagagcagccagttcgcggagtgctccagccagggcacctgacactgtctgatgcacaccggacagcccggtgcgccactggctggagcgagtctgtttgctccaaacttgtagaattgccccaaggtcattttcattgtatgtgtatgtgaactttatgcacctgacaaaatgtcaactaggcaaactagttagtccacatagtttgtgatggtcgtcaaacaccaaaatcgattataggaaatggttaagcccatttccctttcagggaggagcgaggcagggagttcaagtggttgcatgagggttggggtgtagcagggtggcgtcgcgctcaacacagtcggggcggcggtcggcgcgccagccgacgtaagtatcagacaggggctagtcgtcctcctgtagaccgacgaaggcgtggtggagctccagttgtggcgctagcggcgggcgttggtaggacttgctcagccgggcctctggcagctagaacagcaggcgatccaggcacccagggctctacgacagtcggccagggagcgctgagcctggaggtggtgtggatgggcggaaggaggtgccaatgagggggtgggggaagggggtggtgtggcggcctccagtggcggtggctaggaagggccaacgactagggttagtgttagcgagaggctgctgataccatattggagagggagagttggaattgaatattagaacataggtgtagatacaaaaagcagcaccatagtaaggttgtatacatggcctaggcctaataggaacaatactcactaacattaacaccaaaaagcttgtccaacattgattgagatggtttgtacatgtgcaatagagatctctagagacatcattgcgtagtgggatcctaaggcggaatagctatggtaagtgagacggggaagaccaaagttaaaatgggaagaagcaggaaaaggagacttggaaggatagaatatacataaagatttatccttgaataggagcgatagaaaacagctatccacgtgtctataccttgattcatggcttctattgggtttcaactctagcttaccccaacttgcttgggactaaaaggcttttgtgttcatgttgctagtatttctatcagtttcattaaatgtgatattacaattttgttgcgtaggtccaaacctacaagttcataccactggtttatcaaattgcttcgagacttgggagcaccaaagatgctcaggggtcatttaactttcaggtacgtgtatcattttatcttgttttttgtagattgaaagaacagtacatgtcagggaggcactgtccacccggtgaacagtgcctccgtgacagactgacagtacagctctggtatcatggggtgcgggcatactcattagtcagaattaccatgttggaacgtttcaaaaaaaaccagtgcataatcttttaggttatagctgcaacaagtcaatctgaaattcatctagatggcagtaacaaaatacttaacttgattttacgatgatttaaaaaatcgcagcattattgattttctgcaaaactaaaacaatattggttttctgtagcagattgcgttagcttctcttttgaagaaaatggctgttgatcacccatatcatacaatattccaggtaatatagttgtcaatcttgcatgcatatggaaaaatcttgatcaaatatagtggaactgaaatcctaaacctaaacagagttgggtgatatatttataatagagttgttgggcctaaacccattacacagccccattacaacacaaccacaatagatctaacccccccccccccacacccattacacagccccattacaacacaaccacaatttatttatgtatgtttgctactggcctccgtaaggaggcctcttgtattggtcttttaagaccacccctttttctgcttaatatatagtggggcgcagttctcctgcgcgttcgaaaaaaaaggcctctatctaaattggttaggtggtctgagtagcactccttaggtcttgagttcgacttttcgcagaagcgaatttcaggcccctaggactagttagattaaaatgttaaaagaaaattttaagccaatattgtaatatatatatatatatatatctttttacttattctttatttgatatgaatacttttagatatatctaagtgtttatattgttaacatttatatatataaataattagaaaggtccccattttaaatcttcttccggatccctaaaatctcaagactgccattgggtgggccaggggtttggaggttttctcgatccatgtgataaggtcttctttttaatatagtagggattgtcttaccccaccccaggtcgagtttatgcatgtcaaggcaattccaaggtcttcttaatacaatgtctggggggttgtgtctggggggttgtcttaccccccccccccccaggttcagtttgtttaagtctagtttatgcatgttaaggctattccagtatctcttcatctcagatatcagatttttcttcgtggtttttagaactaagaaatagttgtttggtttgtttttagcttttggctctagcaaatggtgatcgtgtcaaagacaagcaaagaagtagaagttcttttgttgtagatatggagaagaagcttgctgctgaaaatttgttaaaggagctatcttcctgtcatggacctctgatttgtcaggttgtgcttaaaattctattcagatgttcttatctctgatgggatcaaatgtattttctgttataatttttatgatccttatttggacatcttatagatgaaacaaatggttgagatctacattaagttagcagaactggagaccaagaaggaggttcgtccacttttcaagcaggaacatggattttttttattctcaatgttaacattcttttcatctaacttattgtcaggacactaacaaaaaaattccgctgcccagggaggcccgcagcattggtcagcttgaactagtgagataacatcttgcgaactttgctttagtgaacttgtttgtgcttcggtaatcattggagataaagtcgtcttttgctagagttgtgcccatggcaggggacatgggctgcacatggctttgttcgatttctctaaatcttgcttgcttaataacttccatggaggggagccactggtatgctaaaaaaactcaatctgtagaggaaagaccaatctccaatcaactaaccatctcaagtagaaacatgataataatgaatgcttgatttggcatatccaaatcatctcaattgatttcaaaagaactattcaatcggtgaatagtttttaaatttaataaatgaaaatgtgcttgcatgaaaaacttacaacaacaacaaatcttacaatagaacccacaagtcaaggttcaggcacatggatagttgttttccagcccgtcatctcctgctctagcaacacgctcacggacgaagtcaagatcgatttccatgtgcttcgtgcgctaatgttgcacgggattggtggagaggtagctcgtgctgacattgtcgcagtagactagggtggagtgctcgagggggcttggagctcctggagaagttggcggagccaggagtcctcagcgctagagcgggagatgacgggctgccgctttgtagcctaggacacgaggttggcgcccaagaacacagcataactggaagtggaccggcgcgtgtcggggcaatcagcccagtcagcatcggtgtagaccccgagctccgacgtcggtgagggtcgaagcagaaggtcatagcgttgaaccgtcaagagcacctgatcgcgccagcgggtgaagtggggtgatatcggatccatcacgacggagaccagggaccggatgttgtttactccggcctcctgagcgtgaagagcagcgatggtagtggcgtcgagctcggtgacgtggtgagcctcaagggctagggggagggcaacgctgtggtcgaggatgaggctctaagtggctgccatctaagcggtcaaggtggcgcctacggcgcgctcacgctccaatgcgaaggatgcaacacgttcgcgctcctgataggcggcgacagtagtttggacggtggcaagggctgcaacgagagtgggattggtcgtgggctcgaccacacttgatgggagcggagaggcccacgtggtttcagtgaagtgcggacgagaggtggggaaaccgggggcgtgcgtcgagcgtgctgcgcggtgtagccctgcacgctgggaagagggctcatggccacggccgtgccggagaggacatgtgcagcagcagcgatgttggggaggaggccggacgatgcggaggagagggcggctgggccagagagagccactgtcgtggcagtgagggttggcgccggaagggagacagcagggaggggctcgaggccggcgaggaacggggcccaggccctggtggcgagctcagtggagttggggcgcgccggagaggaagacatgacgcagggggcggggcggtccagcggcgcgggcttaaagactagagcgatggaagaatgaagccaatcctatagcccaggccctgtactaaccagttcaatccaaaagtttaagatggtgggagaatgaagccaatccacttatacacttcaacaaacctttcgggcatgaaaccaaattagttcaaagaggtcctccttatttctcttggacgatgcacaataactctagtttagtagtatcatagtttagcggtatgtttttgtcagggcctaaggaggcccacggaggggctgcaacagtagcaaccatgggccctccaaggggattagataagaatagttagagataagattagaagattagttgagattatctaggaaggttatcagttagtagtttgttgagagtttttaggagagttttaaggagataaggatctttagctagataggggcggctagccgacctatttatgtaattaatggatgagaaataaagcaggcaagaattagaagggagaaaccctcctcttgctcggccgtaggcagaggcccccggccgacgttcctgcccatcgatacttctctccaatccctcaccgatctagcgaccataacatctggtatcagatagcttgggttttgatctgatcccatgacttctgctgccaatttcgcggcgtcatcctggcaaccggcgtccccatctccatggattgcgccgcatatcaccttcgtcacgtcgtcctggcaactagcgtccctatctccatgggcagcatcgcctgtcaattttgtcaccacatcctggacgccggcgtgcccatctccagggacaacgccaaatttcgtcacatcatcttcgttgacagcgtctccgtccccatgggcgatgccaccaggggcagccacggctcagcaatcaccagctctatcgatgggggacttgtggatcaacataagggctgatctcgcaaagatgcaagcaacgctccagaaggttgagcaagggctattgcagatcaaggtagcagtgtaacatgagcagcaccagctggcgttgtccgcacggctccagacgtcggcagctgtgggcatacaagctgctgctcgtggcttccttgcacgacgaagagtccgggagatgcgccagcagatgctcgaggcagccttggtgatggttgacctcggcacacgggggcgcgacctcgccgtgtcggacggctatcagcagcggcaccgggccgctatctccaagtgcgagcatggtatgtgtcccgctcacgacgaacttcaactctacggcagcgccggtagggaaggcactcccctcgtcatcggcaagggcgcactatttagcgccaccacattccactacctgccgccacgagggcgcctccactggttattgttgcgacctacttcatgtgcccgtccatgtgctcccctttcgtccatgtgatccaggtggctgcacacgtgcaagtccaatgcgcagagggtgtccgccttatcttatggggtaaaatttttttagtagttgagattatctaggaaggttatcagttagtagtttgttgagagtttttaagagaattttaaggagataaggatctctagctagataggggcggccagtcgacctatttatgtaatcaatggatgagaaataaagaagaaaagaattagaagggagaccctcctcttgctcggccgtgggcagaggcccctggccgacgttcctgaaagtcgcctagtggggggtgaataggcgaaacctaaaatttataactttaaacacacattagaagtcgggggttagcgttagaattaaactcaagtcaaaagaatgtttctcttgctaagagttgctcaatcaatgcggataacgtttgggagcaaactcaaatcaatattaagagaactaatagagagggaaaacaaatcaagtgaagatcaagcgagtagacatgatgatttgttttaccgaggttcggttccaaagaacctagtccccgttgaggaggtcacaaagaccgggtctatttcaaccatttctctctctcaacggtcacttagaccgagtaagcttttcctttaatcacacgggtcactaagaccccgcaaggaccaccacactctcaggtgtctcttgctttgcttacaagcacttagaaaagaagtgaggaaggagaaaaggcaatccaagcaacaagagagcaaatgaacacgaacacactctctctcaagtcactaagtggttgagatgtcacatggagagggtttgatatttggaaatgtgtcttggagtgaatgcactagctcttgtattgaatgtgatctctgaaaaacttggttgccaaaggtcgtggtggttgggggtatttatagcccccaaccacattgtagccgttggccaaggctgctggcgatgggcgcaccggacagtccggtgcgccactggacagttactatgcggtttccggtgcgccgccacgtcagccaaccgttagggttcggagctggtcgaccgtttgagactttgtcttcttgcggcaccggatagtccggtgtcctctgacttcgctgctctgatttctgccgcggcactgtagcccactgtagcactttgcagagtcgaccgttggcgcagggagtcgttgcttcgctagcgcaccggatagtccggtggcacaccggacagtccggtgaattatagcggagtgcgccctggaattcccaagagtgactggtttggagttgtatgggcatggtgcaccggacactgtccggtgcgccatttttcagcacactcaagtccttttgctccaataaggttgtgtcattaactttatttctttcttggtttgtgttgaaccttatgcacctgtaatagatgaattctagacaaactagttagtcaatgtgtttgtgttgatcgttcaccaccaaaattaattataggaaatggttaacccaatttccctttcagttcctgcccatcgatacttctctccaatccctcaccgatctagcgaccataacagttttagccatagtttattgtttatttattatgtttcatttattttatcttctttagttgtttgtatgcctattaatcaattttcaaacacttagactcacaattcttctttcccctttgacttcatcaggttccagttgtgactgctaccgttcctattgatcctagctgtcgttatgaggaaggctcctttccacatttcactgggttggctgactccattatgtaagttggatctttagttttacacattacttgctagtttctcctgaaggttgtgtttgtcatatttttagtgttatggccattctcttggcaggatcatgaatggaattaatgctcccaaagttatagaatgttttggctcggatggtaacaaataccgtcaacttgcaaaatctggaaatgatgacctgcgacaggatgctgtatgttcttctctttcattctaataactagatttatatgattatttggcataaagatttttgtaagcttgctctacctactacagagaatgttctagttgctcctttttatcctttttgcaaacatggaactgtgtagtttcattttcaaccttctgttgggagaagactggtgctaaacatcttgaaaatcttgggcttgcagctgctttaaatagggtcttggctaatactagtgctgcagtctagtctagtcgggcctgcttgcacctttgcttccgtttcttctcttgtgttgctgtagaggaggcaggggtgctaggctggtgttgctttggtccagtttgtactctggtccattttggacctctttttcctatcttaatataatggaaactcaaaaaaagggcttcaatttcttggtgattctagtggcatggtggctatggaaacacaggaatgcttgtgtatttgagggggggcctccccaaacatcaataagatcctcgcagagattcaagattttggggatgactggtgcaaaggatctcaggaggttatggccctagaattggatgttgttggtgctgctcgcagcacaccccccctgttttctgtttgttgtttttttttctgtttttcttgtttttctggtcttctttagacccttctttgtcttcttaatataatgatgcgcagttatcctgcgcgttctagaaaaaatatataatgatgcgcagctctcctgtgcgtttgatagaaaaaaataacaacagttttacagaaaggttccatattttattattatttctaattgtttggtagtagtagtactgccactgatatcgttgtcttcattaacaccactgctacagatattgttgtcttcattagtgttttacctataggtgcattagcataagtacagctagtatacaccaaatttctagctgcaaccactattgagtatagagtacaaatgttggtatgctaaactagtatttaatcttattatatgtaaaatgtccccttttagtaaatgtgctttagactcctgcagaatgtcctttttagttgcaccaacttttcttatttatttcttccctttcatgttctcttcctctaaaggaatgctatctgataattttgcctagatgaaattttgacatcaatatgacatgtgcaggtgatggagcaattttttagtttggtaaatacattcttgcaaaatcaccgagatacttctaaaaggagattgaaaatccgtacatataaggtagttatgaatgctataaatttgatagtcttctctatatccagctcttcaaatatttttgtcataaatttcatcatgcgttagtgtgcctttaaatttatcagtgttgctattcccaaatgtataagcacattaggaattgccttgtgaaagatgttagagtggacgcactaaccagttcaacccaaaagcttaagctgatgggacaaggtagtttatccacttatacacttcaacaccccaactcacgtgcagccagagagaactcaatggaacaagagttgcggtagtgaacctacgaacaaaaagaagattttgaatgatgtggggagcaacaaaaacgtctttgaggtagaacggtcctgaaagaaccgagtcacctactaaggtggccgggaaggtggaactgttccccacaataatagaggatggacgggggatgaggaggatgagagtgaggtagcgtgccagcagcaggagtggtgtggtcggaggcgacgtcgtggaaggaggggaatggcatggaccgcctgatgagggcctttaggtgccatagcattgactaagaccacacagaaggttgaggacgagggtgttttcaaggatgggctcactgagatcgcatagggagtccgctatgcccttcatccgatgtcggtactcactgacggagaagtccctttgggagaaccgtcggaaaccggcatcaaggtggagagtgtgtgcttcccgattgccgaggatctagacctcgagggcaacccaggcctagtgagtgcccccccccccctctcctgcttgtggacgatgtcctgaagctcgacggtgagcgtggtgagaatccacgataggaccatgttgtccatccggtgccagcacagaagcagcagggagacagtgtcgcgaggacatggttgtcgagggcgtagcgctagagcgtgaggagcacctggatgcgccaatgggtggatgacatagacaagcgatcggatgttctggacatcggtcgcctgaccatggagggtgacgatgatggcaccacttctttcttgaaaggaccacgcaatggaggggggaggagcaatgagttgtaggcaacatgccggtcctggagggaggcggtggaaccaaagtatgtgtactgtcactattattgaagtcatgagggcgagttgtaggcgacgcgctggtcgtggagcaaagttttatttaaatccaaagttttataattgactccttcctataacaccttttgtcacaggctcacagcatcaaccatatccttgcaaaatggcctgccatgccaaggcccttgtggcctagggcaaccacgccaagacctttgcattgtagcccaatcttgccatggaagctctaaaatgttttattaatagatggggagggcttttgaaacattagattaggaagagttaaaaaaatgaagattattttattgctgtgcactctcccctcgttcaacaatagtttctgagctttctttcttttgcttccacaattttaacttctagcttctgatttgcattttttccatttaatttattttccacggcatcttatcttcttggtatagatttagcataatgctaggtaggcagccactatctatgaatctgtagcctgttcgggacaattagaataaatgtataagggcaacatttggtgtactacataatggaatttgtaatgttgggaaaaccttatgaacattgttcttaaggcgtcgcctaggcgtccaggcggaggtccaacgcctaggcgccttgcccgcctacctcgcctaggcgtcgcctaggcgtccaggcggtggtccaacgccttgtctcaccttaccgctttaaaaaccatgctcatgaatcatagattcatacccagccatacagcgatgctcattttgaatgttgtgacaaatttgtgattactttctctaactcaggttgttcctttcaccccaagtgctggtgttgttgaatgggtaaacggtactgttccactaggcgattatctaattgggaggtctctgtatacatgatgtcagtttttatatgtaaattagattctgaatgcttcatatttatttgactttttgttggggttgtacagtactagaagtggtggagcacatggacgatatggaattggggactggacatatcttcaatgcagagagtacctgatgagtgtatgttgacgtgttgtagaggttttgtattctattttttctaatagagggatgaatgtatttccaatttgaaggaattataatttgcaggaaaaggacaaaaggagggcatttcttaaaatctgcagcaactttaggtctacttccatttgccaatgtcccaacatttacatacatgcatgatgcgtccatgaaaaccatatctagtgtttctctaactattcccccccctccttttttacaataaccaggcctgtgatgcaccacttctttcttgaaagattcttgctgcctgctgattggttccaaagtagacttgcttacacaaggagtgtagcagcaagctcgatggtaatttcttttagtcatgtgcaacttgaggagcttcgtggactactgagactatatgttgcctattgtttttcatggattcaggtaggatatatagtcggtcttggggatcgccattccatgaatattctcatcgaccaagacacagctgaggttgtacacattgatcttggtgttgcatttgaacagggtctcatgcttaaaacacctgaacgggtatgcgatggaaaatgaccttctgtgaatatcaattgccaagtcttcctctgtagaacactttttttgctctatttgtaggttccatttcggttgacaagggatattatagatggcatgggtgttactggtgttgaaggtgtgttcagaagatgttgtgagaaaactctctgtgtcatgagggcgaataaagaagcattgctcactattattgaagtatgtgtgctgtcaaatattttttcataattttatgagacttaaatacttttgctcctcctgagtctggacccaatgtgttaggtcttcgttcatgatcctctatataaatgggcactctcaccactgaaagccttacagcgtcaaaaggtaactacgaacatttgcttaatgttattttctttgcatagcacaccttggtccatacaactgaaactattgatatgtctgttaggacttgacaggtaacgagtacgaccagttgtatccagtattatgcatgtgtagctttcttctcaccaaatgtactctcacatactaagcaaatttaaggacctgataaacaacactacaacagtaatatctcttttttgtcgtaactagcaaacatgtccgtgcattgctatggaatccgatacgtataggaatctgattccgtatcatcgctggacgcgagttgttattccatgggtcatgagtccgggtcacatttgagatacagaggcattgaaatcggaccttgaatctgttatcgataggtgagttattctaactcgaatgaggtcataagttcatataaagtaaaaaatatgaggctgaagaaactctttactactcgggtagttagggagaggcaaaggggaaaaaagataaaattttggctcttcattctcagtgcattcttatagagagaaagacactttcccatcttaaccaaaaatgaaatggctgaggtgaagaaggttccgtttggagggtaccctctggagatccagtagagagacaggatgcgctatggtgtcggggttcgaatgcctgctccacccacagccttccaaagggggaagacctttactttctcccttcctaaggtgcaatgaaatggcggaccgaaagctattgaacttggttatgctcttcctttcgtcgatagatatgcaaaagttaggttagcctaaagaacccgatctgactacaaaaatggaaatgcagtggtcttttgaccatgctgttaacacagatacactgtgtagagttctcctggcaactgtttaaacttttattttgcaggaaacagttgatactgattcatgtttggatgactcccaagaaccttacgatggcaacaaggatgcagctcgagctatacttcgtgttaaacagaagttggatggatatgaagatggcgagatgagaagtgtgcagggccaggttttatcatcgttatactgaagcatgcagatatttatacttttgttacaaaagtcaactttatatttatgtttgccttgtaggtccaacaactcatacaggacgcggtggatgttgatcggttgtgccaaatgtttccaggttggggaccttggttgtaagctccattgaaagggatgtaaattttgatcgaaggcaagagcaacttttttcactgcttatgaggttttattctttggtgtgtttttttccctcaccaccctgtcaacattcctacaaagtacagcaaacggcttttggtaccctgtaaattgatgggaaggcaaggacgacatttgagtgcaggtgggttgtaccactcctgttttagagcatgtccagactagaggatgggtgattgcatagtgaggccacagttttctttttttgttgagcttcattaataccccctctgtctaaaagtcctcatcgtttaagcgtcccgcaccaagaccaaggatgcccctccgcattgcagccgctgtgaagttaattatctggcgccgttttgtattttcaaaacacgcatatgtaatgtcgcaaaaattcagctgcttcgatggttggccggccataggggcggtatccatacatcacaccatcgtgcagcgtacattcagctgcttcgacggttgcataccgtagtttttgttcaggatttactttgtaaagaagtgaggctgttttgtcatgtatgtaaagggcttgtttcgatgtagcatgaaatacgaagaattatgatgcatttgaatataccgtgctcccctgagcaaaaaa

SEQ ID NO: 41 - protein, 2988 aa, Zea mays
MAAVATARDVEEVVQKLQSDRARVRDEGVKLLGTWLQGDRAASFCRLLGRNTVRFKPGHGNLTGATTWPLLVLALLNCVKEDISGKKRGATKSAAARMFRVAVQCAEDVKLSGHSLHLLSVAKQLFVHIWEVIKDGPSLQLEYSIILRQLLNVKEYRYQMKPRTYSNFVSLYMKKVASAFDAKFSNQASSKDESFRCTLTLHVLLENPPSDYPDIMREEVLNGFSAIFLHIREEGKLTRKLMECINTFLLKDGPNLGYKSVKIHNAVQEFIFRCWMTTHDQALKSLFITYVKVQLKIARNIPEILEKLIDVIIKELDKNVNTGPGLLWCEAPRDEKAVSLRCFQEEWMDLSATVFYLACKCTTKTANREKRMKKEHIMNLIVDGLFRGSLFWSGSVCFLIHKYGYHLEKSLLISWFEASCKALRSILIHANAIRFQDSLLWLLRTFKEFSTVLMLDTRDKVQFCLTKGEMSIVEDCWQAIWNSLVHAFPLLSSIDLVADSALILLGGMIMRDQVHTSFLSEDTWNLQIFKKFPSPSALYFVACYFSRIGFQGDLSNSIFVRKTLLRSTLELIHSKEFSLLNEQNVVIIPEAIFSLCAGFSSPVINSSDILQLFGHCKIHSKMSLEDDNWVLKDELPYSVEALSEITLDTCTKVMSHKCHLIHLPGTIQQPMLLELMEFMKGFVASNEQFEKVDLNNLVLVCSLLCNLIHCALLSRTMEEKSSLLQETVDYVTNILKHIVSFVVKKNDELSHGLTNISSALDTMGSAFSSIKSLLSSPIFNLSRVDNGVCSVVIKSITELLDELLVAISQLFCQISSLVSNFDAESTGKMLPTSSINLEDLNPVLDCKSSVADMDLDVMDSSEVDSVTASASGSMGSFLRPLEWKLDLVCIISTFFSVSSLHTWEILYSLVDKEGDVKVRQAILLNLCRNISASSKTVSLVVHFIVDMRDRGASSLLGPAECLTHIHALLKALIAIHGGQNADGKQPGREVFFSENQDILFDLLNRATDISSVDWFSRIKFIDCVSSFVCLFPDVAQDLIGCLLDMLHDADYRVRLYLARQIVVLFQTWEGHNELFNDVCSSIGAKMVKFSNISPVTAREVLAVGPQSVLVIETALITLAHLAVHSEDVEVECLFMISAAAAIEPSQRELAFALFDSISRRLGYASRSKYLDQVMGPILFRWVACEMNLISLVEVQEMFGYGSAEPNNFVEHCSSWLLPFLILRGDGADMNWISKILSQPLSIIIKRYFVPIFGMCIAVRCGTGPEKDLAETVLCESVLQLGEISELERDDLIKKHMVAIVAFLLSVSSSAHGPQIPYFSKKNVALSVRMVVDGFVDTMDDNLADTVVSDKVNIFRADRVFKFLLSIHQQVADASHSRHMGHRLCAIEVLIDVLGHRVVLESTCFYIISIVGNYIQQKPLQGQCCNILSKLLAAFDGNTSAETLQVLGRQLQVVVPKLIFSCLINEKEERSGTEDSSRVLSLLHQLTVEIDPLLYDYIRELEPLPDLDCLKDVQEFHASLSASHSSRNQFLKFVNKAPYLPPELFLLSLRAYHKKLFLGEIIRRSDLSAADTNMVSCWHSDPDVISAVWALVDICSSSSVANEASWVLADFISRAGISDAHQVIFRLPTTTENYSLQLHTGSASKEDKLSTNYGISDDVLVGLLKLLKTYLSDESVEIIDAASQTLRGILSTARGLNALQFLDSPDRSLLMVHSRGVNIQIVEQTISQMEQCAGVSLDDADVWDTDGRTCKQWLCTLVSSLICHCEDTILRLCRSIVFVKVKAAELLLSSTLVNIAGNVDSNTAICKLISTKVEKIIFSDSNHSLKSIHLFLDALNVIRSFYVAEKARTFPSNTLKDGRSARSKSRSPVTTPSSSWKKVYWLSVDYLVAARAASRCSCDFAILMYVELWCEEQFNRLVLGPPEFSNEELLPPHVDLLVAAFTRINEPDSIYGLTLSNEIASQLIRYEHEGDWSSALEYYDLLVRSMPKEHLGTLTGSVLTGPSTVSSRAEDTMLNWKMHKGLMRSLQKTGCSHVLDVYCEGLSHQKGCLQQDAEFIDIQYEAAWRAGNWDFSFFVPYSSWSSTRSRSSCLFNENLHSCLRALQNGDSEEFHAKLCQTKMDLVLALSNTSKESTKYIHSTILKLQILDHATMVWDLRWNLNPNQTSKSPVTKEFSHISTVPKGIQLELLDKEWNLIMFQAERNLDLFEPFLAFRRALLKILGCEEHLVKHLFQSASALRKGLRFSLAAAALYELKELCFHRDESTMTNTYLLARLEDAKLLRAQGQHDMAISLGKYILQKLSDKKNLSDVYRLVGKWLAETRSSNSRTIIEDYLRPSIDLSEFEKSTDKRYMSRQCRTHFHLAHYTYSLFRSYEERLSSNEWQAALRLRKYKTRELEILIKRLRSSSKGVKTDYSVKIQELQKQLALDREEAEKIQDDHDNFLNLALQGYQRSIVVGGKYDLQVVFRLVSLWFSLFSRDQVVKAMLKTTKEVQTYKFIPLVYQIASRLGSTKDAQGSFNFQLLALANGDRVKDKQRSRSSFVVDMEKKLAAENLLKELSSCHGPLICQMKQMVEIYIKLAELETKKEDTNKKIPLPREARSIGQLELVPVVTATVPIDPSCRYEEGSFPHFTGLADSIMIMNGINAPKVIECFGSDGNKYRQLAKSGNDDLRQDAVMEQFFSLVNTFLQNHRDTSKRRLKIRTYKVVPFTPSAGVVEWVNGTVPLGDYLIGSTRSGGAHGRYGIGDWTYLQCREYLMSEKDKRRAFLKICSNFRPVMHHFFLERFLLPADWFQSRLAYTRSVAASSMVGYIVGLGDRHSMNILIDQDTAEVVHIDLGVAFEQGLMLKTPERVPFRLTRDIIDGMGVTGVEGVFRRCCEKTLCVMRANKEALLTIIEVFVHDPLYKWALSPLKALQRQKETVDTDSCLDDSQEPYDGNKDAARAILRVKQKLDGYEDGEMRSVQGQVQQLIQDAVDVDRLCQMFPGWGPWL

SEQ ID NO: 42 - protein, 2954 aa, Zea mays
MAAVATARDVEEVVQKLQSDRARVRDEGVKLLGTWLQGDRAASFCRLLGRNTVRFKPGHGNLTGATTWPLLVLALLNCVKEDISGKKRGATKSAAARMFRVAVQCAEDVKLSGHSLHLLSVAKQLFVHIWEVIKDGPSLQLEYSIILRQLLNVKEYRYQMKPRTYSNFVSLYMKKVASAFDAKFSNQASSKDESFRCTLTLHVLLENPPSDYPDIMREEVLNGFSAIFLHIREEGKLTRKLMECINTFLLKDGPNLGYKSVKIHNAVQEFIFRCWMTTHDQALKSLFITYVKVQLKIARNIPEILEKLIDVIIKELDKNVNTGPGLLWCEAPRDEKAVSLRCFQEEWMDLSATVFYLACKCTTKTANREKRMKKEHIMNLIVDGLFRGSLFWSGSVCFLIHKYGYHLEKSLLISWFEASCKALRSILIHANAIRFQDSLLWLLRTFKEFSTVLMLDTRDKVQFCLTKGEMSIVEDCWQAIWNSLVHAFPLLSSIDLVADSALILLGGMIMRDQVHTSFLSEDTWNLQIFKKFPSPSALYFVACYFSRIGFQGDLSNSIFVRKTLLRSTLELIHSKEFSLLNEQNVVIIPEAIFSLCAGFSSPVINSSDILQLFGHCKIHSKMSLEDDNWVLKDELPYSVEALSEITLDTCTKVMSHKCHLIHLPGTIQQPMLLELMEFMKGFVASNEQFEKVDLNNLVLVCSLLCNLIHCALLSRTMEEKSSLLQETVDYVTNILKHIVSFVVKKNDELSHGLTNISSALDTMGSAFSSIKSLLSSPIFNLSRVDNGVCSVVIKSITELLDELLVAISQLFCQISSLVSNFDAESTGKMLPTSSINLEDLNPVLDCKSSVADMDLDVMDSSEVDSVTASASGSMGSFLRPLEWKLDLVCIISTFFSVSSLHTWEILYSLVDKEGDVKVRQAILLNLCRNISASSKTVSLVVHFIVDMRDRGASSLLGPAECLTHIHALLKALIAIHGGQNADGKQPGREVFFSENQDILFDLLNRATDISSVDWFSRIKFIDCVSSFVCLFPDVAQDLIGCLLDMLHDADYRVRLYLARQIVVLFQTWEGHNELFNDVCSSIGAKMVKFSNISPVTAREVLAVGPQSVLVIETALITLAHLAVHSEDVEVECLFMISAAAAIEPSQRELAFALFDSISRRLGYASRSKYLDQVMGPILFRWVACEMNLISLVEVQEMFGYGSAEPNNFVEHCSSWLLPFLILRGDGADMNWISKILSQPLSIIIKRYFVPIFGMCIAVRCGTGPEKDLAETVLCESVLQLGEISELERDDLIKKHMVAIVAFLLSVSSSAHGPQIPYFSKKNVALSVRMVVDGFVDTMDDNLADTVVSDKVNIFRADRVFKFLLSIHQQVADASHSRHMGHRLCAIEVLIDVLGHRVVLESTCFYIISIVGNYIQQKPLQGQCCNILSKLLAAFDGNTSAETLQVLGRQLQVVVPKLIFSCLINEKEERSGTEDSSRVLSLLHQLTVEIDPLLYDYIRELEPLPDLDCLKDVQEFHASLSASHSSRNQFLKFVNKAPYLPPELFLLSLRAYHKKLFLGEIIRRSDLSAADTNMVSCWHSDPDVISAVWALVDICSSSSVANEASWVLADFISRAGISDAHQVIFRLPTTTENYSLQLHTGSASKEDKLSTNYGISDDVLVGLLKLLKTYLSDESVEIIDAASQTLRGILSTARGLNALQFLDSPDRSLLMVHSRGVNIQIVEQTISQMEQCAGVSLDDADVWDTDGRTCKQWLCTLVSSLICHCEDTILRLCRSIVFVKVKAAELLLSSTLVNIAGNVDSNTAICKLISTKVEKIIFSDSNHSLKSIHLFLDALNVIRSFYVAEKARTFPSNTLKDGRSARSKSRSPVTTPSSSWKKVYWLSVDYLVAARAASRCSCDFAILMYVELWCEEQFNRLVLGPPEFSNEELLPPHVDLLVAAFTRINEPDSIYGLTLSNEIASQLIRYEHEGDWSSALEYYDLLVRSMPKEHLGTLTGSVLTGPSTVSSRAEDTMLNWKMHKGLMRSLQKTGCSHVLDVYCEGLSHQKGCLQQDAEFIDIQYEAAWRAGNWDFSFFVPYSSWSSTRSRSSCLFNENLHSCLRALQNGDSEEFHAKLCQTKMDLVLALSNTSKESTKYIHSTILKLQILDHATMVWDLRWNLNPNQTSKSPVTKEFSHISTVPKGIQLELLDKEWNLIMFQAERNLDLFEPFLAFRRALLKILGCEEHLVKHLFQSASALRKGLRFSLAAAALYELKELCFHRDESTMTNTYLLARLEDAKLLRAQGQHDMAISLGKYILQKLSDKKNLSDVYRLVGKWLAETRSSNSRTIIEDYLRPSIDLSEFEKSTDKRYMSRQCRTHFHLAHYTYSLFRSYEERLSSNEWQAALRLRKYKTRELEILIKRLRSSSKGVKTDYSVKIQELQKQLALDREEAEKIQVQTYKFIPLVYQIASRLGSTKDAQGSFNFQIALASLLKKMAVDHPYHTIFQLLALANGDRVKDKQRSRSSFVVDMEKKLAAENLLKELSSCHGPLICQMKQMVEIYIKLAELETKKEDTNKKIPLPREARSIGQLELVPVVTATVPIDPSCRYEEGSFPHFTGLADSIMIMNGINAPKVIECFGSDGNKYRQLAKSGNDDLRQDAVMEQFFSLVNTFLQNHRDTSKRRLKIRTYKVVPFTPSAGVVEWVNGTVPLGDYLIGSTRSGGAHGRYGIGDWTYLQCREYLMSEKDKRRAFLKICSNFRPVMHHFFLERFLLPADWFQSRLAYTRSVAASSMVGYIVGLGDRHSMNILIDQDTAEVVHIDLGVAFEQGLMLKTPERVPFRLTRDIIDGMGVTGVEGVFRRCCEKTLCVMRANKEALLTIIEVFVHDPLYKWALSPLKALQRQKETVDTDSCLDDSQEPYDGNKDAARAILRVKQKLDGYEDGEMRSVQGQVQQLIQDAVDVDRLCQMFPGWGPWL

SEQ ID NO: 43 - protein, 2993 aa, Zea mays
MAAVATARDVEEVVQKLQSDRARVRDEGVKLLGTWLQGDRAASFCRLLGRNTVRFKPGHGNLTGATTWPLLVLALLNCVKEDISGKKRGATKSAAARMFRVAVQCAEDVKLSGHSLHLLSVAKQLFVHIWEVIKDGPSLQLEYSIILRQLLNVKEYRYQMKPRTYSNFVSLYMKKVASAFDAKFSNQASSKDESFRCTLTLHVLLENPPSDYPDIMREEVLNGFSAIFLHIREEGKLTRKLMECINTFLLKDGPNLGYKSVKIHNAVQEFIFRCWMTTHDQALKSLFITYVKVQLKIARNIPEILEKLIDVIIKELDKNVNTGPGLLWCEAPRDEKAVSLRCFQEEWMDLSATVFYLACKCTTKTANREKRMKKEHIMNLIVDGLFRGSLFWSGSVCFLIHKYGYHLEKSLLISWFEASCKALRSILIHANAIRFQDSLLWLLRTFKEFSTVLMLDTRDKVQFCLTKGEMSIVEDCWQAIWNSLVHAFPLLSSIDLVADSALILLGGMIMRDQVHTSFLSEDTWNLQIFKKFPSPSALYFVACYFSRIGFQGDLSNSIFVRKTLLRSTLELIHSKEFSLLNEQNVVIIPEAIFSLCAGFSSPVINSSDILQLFGHCKIHSKMSLEDDNWVLKDELPYSVEALSEITLDTCTKVMSHKCHLIHLPGTIQQPMLLELMEFMKGFVASNEQFEKVDLNNLVLVCSLLCNLIHCALLSRTMEEKSSLLQETVDYVTNILKHIVSFVVKKNDELSHGLTNISSALDTMGSAFSSIKSLLSSPIFNLSRVDNGVCSVVIKSITELLDELLVAISQLFCQISSLVSNFDAESTGKMLPTSSINLEDLNPVLDCKSSVADMDLDVMDSSEVDSVTASASGSMGSFLRPLEWKLDLVCIISTFFSVSSLHTWEILYSLVDKEGDVKVRQAILLNLCRNISASSKTVSLVVHFIVDMRDRGASSLLGPAECLTHIHALLKALIAIHGGQNADGKQPGREVFFSENQDILFDLLNRATDISSVDWFSRIKFIDCVSSFVCLFPDVAQDLIGCLLDMLHDADYRVRLYLARQIVVLFQTWEGHNELFNDVCSSIGAKMVKFSNISPVTAREVLAVGPQSVLVIETALITLAHLAVHSEDVEVECLFMISAAAAIEPSQRELAFALFDSISRRLGYASRSKYLDQVMGPILFRWVACEMNLISLVEVQEMFGYGSAEPNNFVEHCSSWLLPFLILRGDGADMNWISKILSQPLSIIIKRYFVPIFGMCIAVRCGTGPEKDLAETVLCESVLQLGEISELERDDLIKKHMVAIVAFLLSVSSSAHGPQIPYFSKKNVALSVRMVVDGFVDTMDDNLADTVVSDKVNIFRADRVFKFLLSIHQQVADASHSRHMGHRLCAIEVLIDVLGHRVVLESTCFYIISIVGNYIQQKPLQGQCCNILSKLLAAFDGNTSAETLQVLGRQLQVVVPKLIFSCLINEKEERSGTEDSSRVLSLLHQLTVEIDPLLYDYIRELEPLPDLDCLKDVQEFHASLSASHSSRNQFLKFVNKAPYLPPELFLLSLRAYHKKLFLGEIIRRSDLSAADTNMVSCWHSDPDVISAVWALVDICSSSSVANEASWVLADFISRAGISDAHQVIFRLPTTTENYSLQLHTGSASKEDKLSTNYGISDDVLVGLLKLLKTYLSDESVEIIDAASQTLRGILSTARGLNALQFLDSPDRSLLMVHSRGVNIQIVEQTISQMEQCAGVSLDDADVWDTDGRTCKQWLCTLVSSLICHCEDTILRLCRSIVFVKVKAAELLLSSTLVNIAGNVDSNTAICKLISTKVEKIIFSDSNHSLKSIHLFLDALNVIRSFYVAEKARTFPSNTLKDGRSARSKSRSPVTTPSSSWKKRCSCDFAILMYVELWCEEQFNRLVLGPPEFSNEELLPPHVDLLVAAFTRINEPDSIYGLTLSNEIASQLIRYEHEGDWSSALEYYDLLVRSMPKEHLGTLTGSVLTGPSTVSSRAEDTMLNWKMHKGLMRSLQKTGCSHVLDVYCEGLSHQKGCLQQDAEFIDIQYEAAWRAGNWDFSFFVPYSSWSSTRSRSSCLFNENLHSCLRALQNGDSEEFHAKLCQTKMDLVLALSNTSKESTKYIHSTILKLQILDHATMVWDLRWNLNPNQTSKSPVTKEFSHISTVPKGIQLELLDKEWNLIMFQAERNLDLFEPFLAFRRALLKILGCEEHLVKHLFQSASALRKGLRFSLAAAALYELKELCFHRDESTMTNTYLLARLEDAKLLRAQGQHDMAISLGKYILQKLSDKKNLSDVYRLVGKWLAETRSSNSRTIIEDYLRPSIDLSEFEKSTDKRYMSRQCRTHFHLAHYTYSLFRSYEERLSSNEWQAALRLRKYKTRELEILIKRLRSSSKGVKTDYSVKIQELQKQLALDREEAEKIQDDHDNFLNLALQGYQRSIVVGGKYDLQVVFRLVSLWFSLFSRDQVVKAMLKTTKEVQTYKFIPLVYQIASRLGSTKDAQGSFNFQIALASLLKKMAVDHPYHTIFQLLALANGDRVKDKQRSRSSFVVDMEKKLAAENLLKELSSCHGPLICQMKQMVEIYIKLAELETKKEDTNKKIPLPREARSIGQLELVPVVTATVPIDPSCRYEEGSFPHFTGLADSIMIMNGINAPKVIECFGSDGNKYRQLAKSGNDDLRQDAVMEQFFSLVNTFLQNHRDTSKRRLKIRTYKVVPFTPSAGVVEWVNGTVPLGDYLIGSTRSGGAHGRYGIGDWTYLQCREYLMSEKDKRRAFLKICSNFRPVMHHFFLERFLLPADWFQSRLAYTRSVAASSMVGYIVGLGDRHSMNILIDQDTAEVVHIDLGVAFEQGLMLKTPERVPFRLTRDIIDGMGVTGVEGVFRRCCEKTLCVMRANKEALLTIIEVFVHDPLYKWALSPLKALQRQKETVDTDSCLDDSQEPYDGNKDAARAILRVKQKLDGYEDGEMRSVQGQVQQLIQDAVDVDRLCQMFPGWGPWL

SEQ ID NO: 44 - protein, 3009 aa, Zea mays
MAAVATARDVEEVVQKLQSDRARVRDEGVKLLGTWLQGDRAASFCRLLGRNTVRFKPGHGNLTGATTWPLLVLALLNCVKEDISGKKRGATKSAAARMFRVAVQCAEDVKLSGHSLHLLSVAKQLFVHIWEVIKDGPSLQLEYSIILRQLLNVKEYRYQMKPRTYSNFVSLYMKKVASAFDAKFSNQASSKDESFRCTLTLHVLLENPPSDYPDIMREEVLNGFSAIFLHIREEGKLTRKLMECINTFLLKDGPNLGYKSVKIHNAVQEFIFRCWMTTHDQALKSLFITYVKVQLKIARNIPEILEKLIDVIIKELDKNVNTGPGLLWCEAPRDEKAVSLRCFQEEWMDLSATVFYLACKCTTKTANREKRMKKEHIMNLIVDGLFRGSLFWSGSVCFLIHKYGYHLEKSLLISWFEASCKALRSILIHANAIRFQDSLLWLLRTFKEFSTVLMLDTRDKVQFCLTKGEMSIVEDCWQAIWNSLVHAFPLLSSIDLVADSALILLGGMIMRDQVHTSFLSEDTWNLQIFKKFPSPSALYFVACYFSRIGFQGDLSNSIFVRKTLLRSTLELIHSKEFSLLNEQNVVIIPEAIFSLCAGFSSPVINSSDILQLFGHCKIHSKMSLEDDNWVLKDELPYSVEALSEITLDTCTKVMSHKCHLIHLPGTIQQPMLLELMEFMKGFVASNEQFEKVDLNNLVLVCSLLCNLIHCALLSRTMEEKSSLLQETVDYVTNILKHIVSFVVKKNDELSHGLTNISSALDTMGSAFSSIKSLLSSPIFNLSRVDNGVCSVVIKSITELLDELLVAISQLFCQISSLVSNFDAESTGKMLPTSSINLEDLNPVLDCKSSVADMDLDVMDSSEVDSVTASASGSMGSFLRPLEWKLDLVCIISTFFSVSSLHTWEILYSLVDKEGDVKVRQAILLNLCRNISASSKTVSLVVHFIVDMRDRGASSLLGPAECLTHIHALLKALIAIHGGQNADGKQPGREVFFSENQDILFDLLNRATDISSVDWFSRIKFIDCVSSFVCLFPDVAQDLIGCLLDMLHDADYRVRLYLARQIVVLFQTWEGHNELFNDVCSSIGAKMVKFSNISPVTAREVLAVGPQSVLVIETALITLAHLAVHSEDVEVECLFMISAAAAIEPSQRELAFALFDSISRRLGYASRSKYLDQVMGPILFRWVACEMNLISLVEVQEMFGYGSAEPNNFVEHCSSWLLPFLILRGDGADMNWISKILSQPLSIIIKRYFVPIFGMCIAVRCGTGPEKDLAETVLCESVLQLGEISELERDDLIKKHMVAIVAFLLSVSSSAHGPQIPYFSKKNVALSVRMVVDGFVDTMDDNLADTVVSDKVNIFRADRVFKFLLSIHQQVADASHSRHMGHRLCAIEVLIDVLGHRVVLESTCFYIISIVGNYIQQKPLQGQCCNILSKLLAAFDGNTSAETLQVLGRQLQVVVPKLIFSCLINEKEERSGTEDSSRVLSLLHQLTVEIDPLLYDYIRELEPLPDLDCLKDVQEFHASLSASHSSRNQFLKFVNKAPYLPPELFLLSLRAYHKKLFLGEIIRRSDLSAADTNMVSCWHSDPDVISAVWALVDICSSSSVANEASWVLADFISRAGISDAHQVIFRLPTTTENYSLQLHTGSASKEDKLSTNYGISDDVLVGLLKLLKTYLSDESVEIIDAASQTLRGILSTARGLNALQFLDSPDRSLLMVHSRGVNIQIVEQTISQMEQCAGVSLDDADVWDTDGRTCKQWLCTLVSSLICHCEDTILRLCRSIVFVKVKAAELLLSSTLVNIAGNVDSNTAICKLISTKVEKIIFSDSNHSLKSIHLFLDALNVIRSFYVAEKARTFPSNTLKDGRSARSKSRSPVTTPSSSWKKVYWLSVDYLVAARAASRCSCDFAILMYVELWCEEQFNRLVLGPPEFSNEELLPPHVDLLVAAFTRINEPDSIYGLTLSNEIASQLIRYEHEGDWSSALEYYDLLVRSMPKEHLGTLTGSVLTGPSTVSSRAEDTMLNWKMHKGLMRSLQKTGCSHVLDVYCEGLSHQKGCLQQDAEFIDIQYEAAWRAGNWDFSFFVPYSSWSSTRSRSSCLFNENLHSCLRALQNGDSEEFHAKLCQTKMDLVLALSNTSKESTKYIHSTILKLQILDHATMVWDLRWNLNPNQTSKSPVTKEFSHISTVPKGIQLELLDKEWNLIMFQAERNLDLFEPFLAFRRALLKILGCEEHLVKHLFQSASALRKGLRFSLAAAALYELKELCFHRDESTMTNTYLLARLEDAKLLRAQGQHDMAISLGKYILQKLSDKKNLSDVYRLVGKWLAETRSSNSRTIIEDYLRPSIDLSEFEKSTDKRYMSRQCRTHFHLAHYTYSLFRSYEERLSSNEWQAALRLRKYKTRELEILIKRLRSSSKGVKTDYSVKIQELQKQLALDREEAEKIQDDHDNFLNLALQGYQRSIVVGGKYDLQVVFRLVSLWFSLFSRDQVVKAMLKTTKEVQTYKFIPLVYQIASRLGSTKDAQGSFNFQIALASLLKKMAVDHPYHTIFQLLALANGDRVKDKQRSRSSFVVDMEKKLAAENLLKELSSCHGPLICQMKQMVEIYIKLAELETKKEDTNKKIPLPREARSIGQLELVPVVTATVPIDPSCRYEEGSFPHFTGLADSIMIMNGINAPKVIECFGSDGNKYRQLAKSGNDDLRQDAVMEQFFSLVNTFLQNHRDTSKRRLKIRTYKVVPFTPSAGVVEWVNGTVPLGDYLIGSTRSGGAHGRYGIGDWTYLQCREYLMSEKDKRRAFLKICSNFRPVMHHFFLERFLLPADWFQSRLAYTRSVAASSMVGYIVGLGDRHSMNILIDQDTAEVVHIDLGVAFEQGLMLKTPERVPFRLTRDIIDGMGVTGVEGVFRRCCEKTLCVMRANKEALLTIIEVFVHDPLYKWALSPLKALQRQKETVDTDSCLDDSQEPYDGNKDAARAILRVKQKLDGYEDGEMRSVQGQVQQLIQDAVDVDRLCQMFPGWGPWL

SEQ ID NO: 45 - protein, 2955 aa, Zea mays
MAAVATARDVEEVVQKLQSDRARVRDEGVKLLGTWLQGDRAASFCRLLGRNTVRFKPGHGNLTGATTWPLLVLALLNCVKEDISGKKRGATKSAAARMFRVAVQCAEDVKLSGHSLHLLSVAKQLFVHIWEVIKDGPSLQLEYSIILRQLLNVKEYRYQMKPRTYSNFVSLYMKKVASAFDAKFSNQASSKDESFRCTLTLHVLLENPPSDYPDIMREEVLNGFSAIFLHIREEGKLTRKLMECINTFLLKDGPNLGYKSVKIHNAVQEFIFRCWMTTHDQALKSLFITYVKVQLKIARNIPEILEKLIDVIIKELDKNVNTGPGLLWCEAPRDEKAVSLRCFQEEWMDLSATVFYLACKCTTKTANREKRMKKEHIMNLIVDGLFRGSLFWSGSVCFLIHKYGYHLEKSLLISWFEASCKALRSILIHANAIRFQDSLLWLLRTFKEFSTVLMLDTRDKVQFCLTKGEMSIVEDCWQAIWNSLVHAFPLLSSIDLVADSALILLGGMIMRDQVHTSFLSEDTWNLQIFKKFPSPSALYFVACYFSRIGFQGDLSNSIFVRKTLLRSTLELIHSKEFSLLNEQNVVIIPEAIFSLCAGFSSPVINSSDILQLFGHCKIHSKMSLEDDNWVLKDELPYSVEALSEITLDTCTKVMSHKCHLIHLPGTIQQPMLLELMEFMKGFVASNEQFEKVDLNNLVLVCSLLCNLIHCALLSRTMEEKSSLLQETVDYVTNILKHIVSFVVKKNDELSHGLTNISSALDTMGSAFSSIKSLLSSPIFNLSRVDNGVCSVVIKSITELLDELLVAISQLFCQISSLVSNFDAESTGKMLPTSSINLEDLNPVLDCKSSVADMDLDVMDSSEVDSVTASASGSMGSFLRPLEWKLDLVCIISTFFSVSSLHTWEILYSLVDKEGDVKVRQAILLNLCRNISASSKTVSLVVHFIVDMRDRGASSLLGPAECLTHIHALLKALIAIHGGQNADGKQPGREVFFSENQDILFDLLNRATDISSVDWFSRIKFIDCVSSFVCLFPDVAQDLIGCLLDMLHDADYRVRLYLARQIVVLFQTWEGHNELFNDVCSSIGAKMVKFSNISPVTAREVLAVGPQSVLVIETALITLAHLAVHSEDVEVECLFMISAAAAIEPSQRELAFALFDSISRRLGYASRSKYLDQVMGPILFRWVACEMNLISLVEVQEMFGYGSAEPNNFVEHCSSWLLPFLILRGDGADMNWISKILSQPLSIIIKRYFVPIFGMCIAVRCGTGPEKDLAETVLCESVLQLGEISELERDDLIKKHMVAIVAFLLSVSSSAHGPQIPYFSKKNVALSVRMVVDGFVDTMDDNLADTVVSDKVNIFRADRVFKFLLSIHQQVADASHSRHMGHRLCAIEVLIDVLGHRVVLESTCFYIISIVGNYIQQKPLQGQCCNILSKLLAAFDGNTSAETLQVLGRQLQVVVPKLIFSCLINEKEERSGTEDSSRVLSLLHQLTVEIDPLLYDYIRELEPLPDLDCLKDVQEFHASLSASHSSRNQFLKFVNKAPYLPPELFLLSLRAYHKKLFLGEIIRRSDLSAADTNMVSCWHSDPDVISAVWALVDICSSSSVANEASWVLADFISRAGISDAHQVIFRLPTTTENYSLQLHTGSASKEDKLSTNYGISDDVLVGLLKLLKTYLSDESVEIIDAASQTLRGILSTARGLNALQFLDSPDRSLLMVHSRGVNIQIVEQTISQMEQCAGVSLDDADVWDTDGRTCKQWLCTLVSSLICHCEDTILRLCRSIVFVKVKAAELLLSSTLVNIAGNVDSNTAICKLISTKVEKIIFSDSNHSLKSIHLFLDALNVIRSFYVAEKARTFPSNTLKDGRSARSKSRSPVTTPSSSWKKVYWLSVDYLVAARAASRCSCDFAILMYVELWCEEQFNRLVLGPPEFSNEELLPPHVDLLVAAFTRINEPDSIYGLTLSNEIASQLIRYEHEGDWSSALEYYDLLVRSMPKEHLGTLTGSVLTGPSTVSSRAEDTMLNWKMHKGLMRSLQKTGCSHVLDVYCEGLSHQKGCLQQDAEFIDIQYEAAWRAGNWDFSFFVPYSSWSSTRSRSSCLFNENLHSCLRALQNGDSEEFHAKLCQTKMDLVLALSNTSKESTKYIHSTILKLQILDHATMVWDLRWNLNPNQTSKSPVTKEFSHISTVPKGIQLELLDKEWNLIMFQAERNLDLFEPFLAFRRALLKILGCEEHLVKHLFQSASALRKGLRFSLAAAALYELKELCFHRDESTMTNTYLLARLEDAKLLRAQGQHDMAISLGKYILQKLSDKKNLSDVYRLVGKWLAETRSSNSRTIIEDYLRPSIDLSEFEKSTDKRYMSRQCRTHFHLAHYTYSLFRSYEERLSSNEWQAALRLRKYKTRELEILIKRLRSSSKGVKTDYSVKIQELQKQLALDREEAEKIQVQTYKFIPLVYQIASRLGSTKDAQGSFNFQQIALASLLKKMAVDHPYHTIFQLLALANGDRVKDKQRSRSSFVVDMEKKLAAENLLKELSSCHGPLICQMKQMVEIYIKLAELETKKEDTNKKIPLPREARSIGQLELVPVVTATVPIDPSCRYEEGSFPHFTGLADSIMIMNGINAPKVIECFGSDGNKYRQLAKSGNDDLRQDAVMEQFFSLVNTFLQNHRDTSKRRLKIRTYKVVPFTPSAGVVEWVNGTVPLGDYLIGSTRSGGAHGRYGIGDWTYLQCREYLMSEKDKRRAFLKICSNFRPVMHHFFLERFLLPADWFQSRLAYTRSVAASSMVGYIVGLGDRHSMNILIDQDTAEVVHIDLGVAFEQGLMLKTPERVPFRLTRDIIDGMGVTGVEGVFRRCCEKTLCVMRANKEALLTIIEVFVHDPLYKWALSPLKALQRQKETVDTDSCLDDSQEPYDGNKDAARAILRVKQKLDGYEDGEMRSVQGQVQQLIQDAVDVDRLCQMFPGWGPWL

SEQ ID NO: 46 - protein, 3007 aa, Zea mays
MAAVATARDVEEVVQKLQSDRARVRDEGVKLLGTWLQGDRAASFCRLLGRNTVRFKPGHGNLTGATTWPLLVLALLNCVKEDISGKKRGATKSAAARMFRVAVQCAEDVKLSGHSLHLLSVAKQLFVHIWEVIKDGPSLQLEYSIILRQLLNVKEYRYQMKPRTYSNFVSLYMKKVASAFDAKFSNQASSKDESFRCTLTLHVLLENPPSDYPDIMREEVLNGFSAIFLHIREEGKLTRKLMECINTFLLKDGPNLGYKSVKIHNAVQEFIFRCWMTTHDQALKSLFITYVKVQLKIARNIPEILEKLIDVIIKELDKNVNTGPGLLWCEAPRDEKAVSLRCFQEEWMDLSATVFYLACKCTTKTANREKRMKKEHIMNLIVDGLFRGSLFWSGSVCFLIHKYGYHLEKSLLISWFEASCKALRSILIHANAIRFQDSLLWLLRTFKEFSTVLMLDTRDKVQFCLTKGEMSIVEDCWQAIWNSLVHAFPLLSSIDLVADSALILLGGMIMRDQVHTSFLSEDTWNLQIFKKFPSPSALYFVACYFSRIGFQGDLSNSIFVRKTLLRSTLELIHSKEFSLLNEQNVVIIPEAIFSLCAGFSSPVINSSDILQLFGHCKIHSKMSLEDDNWVLKDELPYSVEALSEITLDTCTKVMSHKCHLIHLPGTIQQPMLLELMEFMKGFVASNEQFEKVDLNNLVLVCSLLCNLIHCALLSRTMEEKSSLLQETVDYVTNILKHIVSFVVKKNDELSHGLTNISSALDTMGSAFSSIKSLLSSPIFNLSRVDNGVCSVVIKSITELLDELLVAISQLFCQISSLVSNFDAESTGKMLPTSSINLEDLNPVLDCKSSVADMDLDVMDSSEVDSVTASASGSMGSFLRPLEWKLDLVCIISTFFSVSSLHTWEILYSLVDKEGDVKVRQAILLNLCRNISASSKTVSLVVHFIVDMRDRGASSLLGPAECLTHIHALLKALIAIHGGQNADGKQPGREVFFSENQDILFDLLNRATDISSVDWFSRIKFIDCVSSFVCLFPDVAQDLIGCLLDMLHDADYRVRLYLARQIVVLFQTWEGHNELFNDVCSSIGAKMVKFSNISPVTAREVLAVGPQSVLVIETALITLAHLAVHSEDVEVECLFMISAAAAIEPSQRELAFALFDSISRRLGYASRSKYLDQVMGPILFRWVACEMNLISLVEVQEMFGYGSAEPNNFVEHCSSWLLPFLILRGDGADMNWISKILSQPLSIIIKRYFVPIFGMCIAVRCGTGPEKDLAETVLCESVLQLGEISELERDDLIKKHMVAIVAFLLSVSSSAHGPQIPYFSKKNVALSVRMVVDGFVDTMDDNLADTVVSDKVNIFRADRVFKFLLSIHQQVADASHSRHMGHRLCAIEVLIDVLGHRVVLESTCFYIISIVGNYIQQKPLQGQCCNILSKLLAAFDGNTSAETLQVLGRQLQVVVPKLIFSCLINEKEERSGTEDSSRVLSLLHQLTVEIDPLLYDYIRELEPLPDLDCLKDVQEFHASLSASHSSRNQFLKFVNKAPYLPPELFLLSLRAYHKKLFLGEIIRRSDLSAADTNMVSCWHSDPDVISAVWALVDICSSSSVANEASWVLADFISRAGISDAHQVIFRLPTTTENYSLQLHTGSASKEDKLSTNYGISDDVLVGLLKLLKTYLSDESVEIIDAASQTLRGILSTARGLNALQFLDSPDRSLLMVHSRGVNIQIVEQTISQMEQCAGVSLDDADVWDTDGRTCKQWLCTLVSSLICHCEDTILRLCRSIVFVKVKAAELLLSSTLVNIAGNVDSNTAICKLISTKVEKIIFSDSNHSLKSIHLFLDALNVIRSFYVAEKARTFPSNTLKDGRSARSKSRSPVTTPSSSWKKVYWLSVDYLVAARAASRCSCDFAILMYVELWCEEQFNRLVLGPPEFSNEELLPPHVDLLVAAFTRINEPDSIYGLTLSNEIASQLIRYEHEGDWSSALEYYDLLVRSMPKEHLGTLTGSVLTGPSTVSSRAEDTMLNWKMHKGLMRSLQKTGCSHVLDVYCEGLSHQKGCLQQDAEFIDIQYEAAWRAGNWDFSFFVPYSSWSSTRSRSSCLFNENLHSCLRALQNGDSEEFHAKLCQTKMDLVLALSNTSKESTKYIHSTILKLQILDHATMVWDLRWNLNPNQTSKSPVTKEFSHISTVPKGIQLELLDKEWNLIMFQAERNLDLFEPFLAFRRALLKILGCEEHLVKHLFQSASALRKGLRFSLAAAALYELKELCFHRDESTMTNTYLLARLEDAKLLRAQGQHDMAISLGKYILQKLSDKKNLSDVYRLVGKWLAETRSSNSRTIIEDYLRPSIDLSEFEKSTDKRYMSRQCRTHFHLAHYTYSLFRSYEERLSSNEWQAALRLRKYKTRELEILIKRLRSSSKTDYSVKIQELQKQLALDREEAEKIQDDHDNFLNLALQGYQRSIVVGGKYDLQVVFRLVSLWFSLFSRDQVVKAMLKTTKEVQTYKFIPLVYQIASRLGSTKDAQGSFNFQQIALASLLKKMAVDHPYHTIFQLLALANGDRVKDKQRSRSSFVVDMEKKLAAENLLKELSSCHGPLICQMKQMVEIYIKLAELETKKEDTNKKIPLPREARSIGQLELVPVVTATVPIDPSCRYEEGSFPHFTGLADSIMIMNGINAPKVIECFGSDGNKYRQLAKSGNDDLRQDAVMEQFFSLVNTFLQNHRDTSKRRLKIRTYKVVPFTPSAGVVEWVNGTVPLGDYLIGSTRSGGAHGRYGIGDWTYLQCREYLMSEKDKRRAFLKICSNFRPVMHHFFLERFLLPADWFQSRLAYTRSVAASSMVGYIVGLGDRHSMNILIDQDTAEVVHIDLGVAFEQGLMLKTPERVPFRLTRDIIDGMGVTGVEGVFRRCCEKTLCVMRANKEALLTIIEVFVHDPLYKWALSPLKALQRQKETVDTDSCLDDSQEPYDGNKDAARAILRVKQKLDGYEDGEMRSVQGQVQQLIQDAVDVDRLCQMFPGWGPWL

SEQ ID NO: 47 - protein, 2994 aa, Zea mays
MAAVATARDVEEVVQKLQSDRARVRDEGVKLLGTWLQGDRAASFCRLLGRNTVRFKPGHGNLTGATTWPLLVLALLNCVKEDISGKKRGATKSAAARMFRVAVQCAEDVKLSGHSLHLLSVAKQLFVHIWEVIKDGPSLQLEYSIILRQLLNVKEYRYQMKPRTYSNFVSLYMKKVASAFDAKFSNQASSKDESFRCTLTLHVLLENPPSDYPDIMREEVLNGFSAIFLHIREEGKLTRKLMECINTFLLKDGPNLGYKSVKIHNAVQEFIFRCWMTTHDQALKSLFITYVKVQLKIARNIPEILEKLIDVIIKELDKNVNTGPGLLWCEAPRDEKAVSLRCFQEEWMDLSATVFYLACKCTTKTANREKRMKKEHIMNLIVDGLFRGSLFWSGSVCFLIHKYGYHLEKSLLISWFEASCKALRSILIHANAIRFQDSLLWLLRTFKEFSTVLMLDTRDKVQFCLTKGEMSIVEDCWQAIWNSLVHAFPLLSSIDLVADSALILLGGMIMRDQVHTSFLSEDTWNLQIFKKFPSPSALYFVACYFSRIGFQGDLSNSIFVRKTLLRSTLELIHSKEFSLLNEQNVVIIPEAIFSLCAGFSSPVINSSDILQLFGHCKIHSKMSLEDDNWVLKDELPYSVEALSEITLDTCTKVMSHKCHLIHLPGTIQQPMLLELMEFMKGFVASNEQFEKVDLNNLVLVCSLLCNLIHCALLSRTMEEKSSLLQETVDYVTNILKHIVSFVVKKNDELSHGLTNISSALDTMGSAFSSIKSLLSSPIFNLSRVDNGVCSVVIKSITELLDELLVAISQLFCQISSLVSNFDAESTGKMLPTSSINLEDLNPVLDCKSSVADMDLDVMDSSEVDSVTASASGSMGSFLRPLEWKLDLVCIISTFFSVSSLHTWEILYSLVDKEGDVKVRQAILLNLCRNISASSKTVSLVVHFIVDMRDRGASSLLGPAECLTHIHALLKALIAIHGGQNADGKQPGREVFFSENQDILFDLLNRATDISSVDWFSRIKFIDCVSSFVCLFPDVAQDLIGCLLDMLHDADYRVRLYLARQIVVLFQTWEGHNELFNDVCSSIGAKMVKFSNISPVTAREVLAVGPQSVLVIETALITLAHLAVHSEDVEVECLFMISAAAAIEPSQRELAFALFDSISRRLGYASRSKYLDQVMGPILFRWVACEMNLISLVEVQEMFGYGSAEPNNFVEHCSSWLLPFLILRGDGADMNWISKILSQPLSIIIKRYFVPIFGMCIAVRCGTGPEKDLAETVLCESVLQLGEISELERDDLIKKHMVAIVAFLLSVSSSAHGPQIPYFSKKNVALSVRMVVDGFVDTMDDNLADTVVSDKVNIFRADRVFKFLLSIHQQVADASHSRHMGHRLCAIEVLIDVLGHRVVLESTCFYIISIVGNYIQQKPLQGQCCNILSKLLAAFDGNTSAETLQVLGRQLQVVVPKLIFSCLINEKEERSGTEDSSRVLSLLHQLTVEIDPLLYDYIRELEPLPDLDCLKDVQEFHASLSASHSSRNQFLKFVNKAPYLPPELFLLSLRAYHKKLFLGEIIRRSDLSAADTNMVSCWHSDPDVISAVWALVDICSSSSVANEASWVLADFISRAGISDAHQVIFRLPTTTENYSLQLHTGSASKEDKLSTNYGISDDVLVGLLKLLKTYLSDESVEIIDAASQTLRGILSTARGLNALQFLDSPDRSLLMVHSRGVNIQIVEQTISQMEQCAGVSLDDADVWDTDGRTCKQWLCTLVSSLICHCEDTILRLCRSIVFVKVKAAELLLSSTLVNIAGNVDSNTAICKLISTKVEKIIFSDSNHSLKSIHLFLDALNVIRSFYVAEKARTFPSNTLKDGRSARSKSRSPVTTPSSSWKKRCSCDFAILMYVELWCEEQFNRLVLGPPEFSNEELLPPHVDLLVAAFTRINEPDSIYGLTLSNEIASQLIRYEHEGDWSSALEYYDLLVRSMPKEHLGTLTGSVLTGPSTVSSRAEDTMLNWKMHKGLMRSLQKTGCSHVLDVYCEGLSHQKGCLQQDAEFIDIQYEAAWRAGNWDFSFFVPYSSWSSTRSRSSCLFNENLHSCLRALQNGDSEEFHAKLCQTKMDLVLALSNTSKESTKYIHSTILKLQILDHATMVWDLRWNLNPNQTSKSPVTKEFSHISTVPKGIQLELLDKEWNLIMFQAERNLDLFEPFLAFRRALLKILGCEEHLVKHLFQSASALRKGLRFSLAAAALYELKELCFHRDESTMTNTYLLARLEDAKLLRAQGQHDMAISLGKYILQKLSDKKNLSDVYRLVGKWLAETRSSNSRTIIEDYLRPSIDLSEFEKSTDKRYMSRQCRTHFHLAHYTYSLFRSYEERLSSNEWQAALRLRKYKTRELEILIKRLRSSSKGVKTDYSVKIQELQKQLALDREEAEKIQDDHDNFLNLALQGYQRSIVVGGKYDLQVVFRLVSLWFSLFSRDQVVKAMLKTTKEVQTYKFIPLVYQIASRLGSTKDAQGSFNFQQIALASLLKKMAVDHPYHTIFQLLALANGDRVKDKQRSRSSFVVDMEKKLAAENLLKELSSCHGPLICQMKQMVEIYIKLAELETKKEDTNKKIPLPREARSIGQLELVPVVTATVPIDPSCRYEEGSFPHFTGLADSIMIMNGINAPKVIECFGSDGNKYRQLAKSGNDDLRQDAVMEQFFSLVNTFLQNHRDTSKRRLKIRTYKVVPFTPSAGVVEWVNGTVPLGDYLIGSTRSGGAHGRYGIGDWTYLQCREYLMSEKDKRRAFLKICSNFRPVMHHFFLERFLLPADWFQSRLAYTRSVAASSMVGYIVGLGDRHSMNILIDQDTAEVVHIDLGVAFEQGLMLKTPERVPFRLTRDIIDGMGVTGVEGVFRRCCEKTLCVMRANKEALLTIIEVFVHDPLYKWALSPLKALQRQKETVDTDSCLDDSQEPYDGNKDAARAILRVKQKLDGYEDGEMRSVQGQVQQLIQDAVDVDRLCQMFPGWGPWL

SEQ ID NO: 48 - protein, 3010 aa, Zea mays
MAAVATARDVEEVVQKLQSDRARVRDEGVKLLGTWLQGDRAASFCRLLGRNTVRFKPGHGNLTGATTWPLLVLALLNCVKEDISGKKRGATKSAAARMFRVAVQCAEDVKLSGHSLHLLSVAKQLFVHIWEVIKDGPSLQLEYSIILRQLLNVKEYRYQMKPRTYSNFVSLYMKKVASAFDAKFSNQASSKDESFRCTLTLHVLLENPPSDYPDIMREEVLNGFSAIFLHIREEGKLTRKLMECINTFLLKDGPNLGYKSVKIHNAVQEFIFRCWMTTHDQALKSLFITYVKVQLKIARNIPEILEKLIDVIIKELDKNVNTGPGLLWCEAPRDEKAVSLRCFQEEWMDLSATVFYLACKCTTKTANREKRMKKEHIMNLIVDGLFRGSLFWSGSVCFLIHKYGYHLEKSLLISWFEASCKALRSILIHANAIRFQDSLLWLLRTFKEFSTVLMLDTRDKVQFCLTKGEMSIVEDCWQAIWNSLVHAFPLLSSIDLVADSALILLGGMIMRDQVHTSFLSEDTWNLQIFKKFPSPSALYFVACYFSRIGFQGDLSNSIFVRKTLLRSTLELIHSKEFSLLNEQNVVIIPEAIFSLCAGFSSPVINSSDILQLFGHCKIHSKMSLEDDNWVLKDELPYSVEALSEITLDTCTKVMSHKCHLIHLPGTIQQPMLLELMEFMKGFVASNEQFEKVDLNNLVLVCSLLCNLIHCALLSRTMEEKSSLLQETVDYVTNILKHIVSFVVKKNDELSHGLTNISSALDTMGSAFSSIKSLLSSPIFNLSRVDNGVCSVVIKSITELLDELLVAISQLFCQISSLVSNFDAESTGKMLPTSSINLEDLNPVLDCKSSVADMDLDVMDSSEVDSVTASASGSMGSFLRPLEWKLDLVCIISTFFSVSSLHTWEILYSLVDKEGDVKVRQAILLNLCRNISASSKTVSLVVHFIVDMRDRGASSLLGPAECLTHIHALLKALIAIHGGQNADGKQPGREVFFSENQDILFDLLNRATDISSVDWFSRIKFIDCVSSFVCLFPDVAQDLIGCLLDMLHDADYRVRLYLARQIVVLFQTWEGHNELFNDVCSSIGAKMVKFSNISPVTAREVLAVGPQSVLVIETALITLAHLAVHSEDVEVECLFMISAAAAIEPSQRELAFALFDSISRRLGYASRSKYLDQVMGPILFRWVACEMNLISLVEVQEMFGYGSAEPNNFVEHCSSWLLPFLILRGDGADMNWISKILSQPLSIIIKRYFVPIFGMCIAVRCGTGPEKDLAETVLCESVLQLGEISELERDDLIKKHMVAIVAFLLSVSSSAHGPQIPYFSKKNVALSVRMVVDGFVDTMDDNLADTVVSDKVNIFRADRVFKFLLSIHQQVADASHSRHMGHRLCAIEVLIDVLGHRVVLESTCFYIISIVGNYIQQKPLQGQCCNILSKLLAAFDGNTSAETLQVLGRQLQVVVPKLIFSCLINEKEERSGTEDSSRVLSLLHQLTVEIDPLLYDYIRELEPLPDLDCLKDVQEFHASLSASHSSRNQFLKFVNKAPYLPPELFLLSLRAYHKKLFLGEIIRRSDLSAADTNMVSCWHSDPDVISAVWALVDICSSSSVANEASWVLADFISRAGISDAHQVIFRLPTTTENYSLQLHTGSASKEDKLSTNYGISDDVLVGLLKLLKTYLSDESVEIIDAASQTLRGILSTARGLNALQFLDSPDRSLLMVHSRGVNIQIVEQTISQMEQCAGVSLDDADVWDTDGRTCKQWLCTLVSSLICHCEDTILRLCRSIVFVKVKAAELLLSSTLVNIAGNVDSNTAICKLISTKVEKIIFSDSNHSLKSIHLFLDALNVIRSFYVAEKARTFPSNTLKDGRSARSKSRSPVTTPSSSWKKVYWLSVDYLVAARAASRCSCDFAILMYVELWCEEQFNRLVLGPPEFSNEELLPPHVDLLVAAFTRINEPDSIYGLTLSNEIASQLIRYEHEGDWSSALEYYDLLVRSMPKEHLGTLTGSVLTGPSTVSSRAEDTMLNWKMHKGLMRSLQKTGCSHVLDVYCEGLSHQKGCLQQDAEFIDIQYEAAWRAGNWDFSFFVPYSSWSSTRSRSSCLFNENLHSCLRALQNGDSEEFHAKLCQTKMDLVLALSNTSKESTKYIHSTILKLQILDHATMVWDLRWNLNPNQTSKSPVTKEFSHISTVPKGIQLELLDKEWNLIMFQAERNLDLFEPFLAFRRALLKILGCEEHLVKHLFQSASALRKGLRFSLAAAALYELKELCFHRDESTMTNTYLLARLEDAKLLRAQGQHDMAISLGKYILQKLSDKKNLSDVYRLVGKWLAETRSSNSRTIIEDYLRPSIDLSEFEKSTDKRYMSRQCRTHFHLAHYTYSLFRSYEERLSSNEWQAALRLRKYKTRELEILIKRLRSSSKGVKTDYSVKIQELQKQLALDREEAEKIQDDHDNFLNLALQGYQRSIVVGGKYDLQVVFRLVSLWFSLFSRDQVVKAMLKTTKEVQTYKFIPLVYQIASRLGSTKDAQGSFNFQQIALASLLKKMAVDHPYHTIFQLLALANGDRVKDKQRSRSSFVVDMEKKLAAENLLKELSSCHGPLICQMKQMVEIYIKLAELETKKEDTNKKIPLPREARSIGQLELVPVVTATVPIDPSCRYEEGSFPHFTGLADSIMIMNGINAPKVIECFGSDGNKYRQLAKSGNDDLRQDAVMEQFFSLVNTFLQNHRDTSKRRLKIRTYKVVPFTPSAGVVEWVNGTVPLGDYLIGSTRSGGAHGRYGIGDWTYLQCREYLMSEKDKRRAFLKICSNFRPVMHHFFLERFLLPADWFQSRLAYTRSVAASSMVGYIVGLGDRHSMNILIDQDTAEVVHIDLGVAFEQGLMLKTPERVPFRLTRDIIDGMGVTGVEGVFRRCCEKTLCVMRANKEALLTIIEVFVHDPLYKWALSPLKALQRQKETVDTDSCLDDSQEPYDGNKDAARAILRVKQKLDGYEDGEMRSVQGQVQQLIQDAVDVDRLCQMFPGWGPWL

SEQ ID NO: 49 - DNA, 11170 bp, Arabidopsis thaliana
tgggagggaaggggaaggggactggagcgagagagcttctgcgattgtgaaatggcgaaggacgacaataatctgtcgagcttggttcacgaacttcgtgaacgggtggccgcatccgcctccactccggctaacaacctccgtcactcttccggagacgaagatgctctagagattcgatttcgtgctgtcatccctaatctattgaatacctacgttgttccttctctcggtaataactgtctcttgtttctgttcccttggatgattcttagcttggattttgccggaattgatttaggttaacctaggattgctttttccaatttcacaggcaacgggagggaagttacagctgttctgaagcttgttggtcacacagcaaggaacattccaggagtcttctatcacggaaccccttctgctatcctccctgtgattgctcgtattattcccttctttgctgaaccagaatttgtgtaagtgttgttgttttcactagcatttgggtcactcttcaagagttttgctctaatgcttaaaatcaattgcagtcctgggcatggagtattacttgaaactgttggctctctcttaatgttgctgcgttccaactcaaggaaggcataccggatcttcttccatgacgctttgcaggcaattcaaggtgagtgtaagactgttggagatagttgcttgaaaaactggctccctgaatgttaataatggttccaaattcttcaacttatactgaactaacgtgcctttttgtgtgtccagatatgcaacctattgcatcactgcactcaattgaaccggaagtttgtgaatctcacattccatttaggtgtttctgtatgtccttttctggaattgggggtgatctgccagatgctaataagcccagagatggtgatggtcttgtgttgaacttattgggagccaaccgatggcaaccttttgctacttgtattcttaaactcatctgtaaatgcctaactgaggggacactctacgtccagggtctcatccatacatcattttttaaggcggcttgttctctagtatgctgtggtggcgcagatgtgcagatggtgagttgttcaatagcttgtgatttgctttatctgatcggtttaggtgcatttaattttctttgaagatgtgatggttttgggacattaatctgacatctgatttttctatggaaggcatgctttgaatttgctactcttgtcggatcaatccttacattcaacatcctcccgcatgtggccttaatacagtcaatcatcctccttttaagtgcagatgaaggacttcctgtgtacaggtgtgttcccacatgtcaaagcacagctcttttgttttattttgatatgattgtgaatattaattacgtttactgggtcttctttgtttaccttcctcacattaagtgtgggaaaaaaatgtgttaagttactttttttttccactcgttcagtgaatcttctcatatgaaggtataagaatatagatttaccttcactttgaacttaaattctgggtttgtatgacaggaatacgatttatgattctaccattggacgtttccttacggcagtatattccagctgttctgatgccgctgtcaaactaactgcagaaagtttagtgttggttctctctcatgctttacagagaacaaaaagtgaggagcttaaggtatatttggatgtttcttctcatctccacttcaatgagtgtctgatcagttctttttattttctttccgctgctgctttttcaacaactttatgggaaatcatatcgggaatttatttatgtaggcttccctctgcagtgcatatgtgcggattgtgaaatcttgtcctccttgtatatggaagatacactgccttctagagttgcttcatcttccagaaccttgttttcagttgatagaatgttttaaagcagttcttatagttcttggacctgggtgtgttcgagttgagacaaccaaatgtggtagtcatacatcagcaacaagtgatagacctgtccagggaattaacgctggaaaaaaaaggcatattgaggatgaaagtacatacaaaagaaagcgccagaaggttggtgatgatattcgacgaggggtttactttgctcctgaatttgccgatgagactgatggaaaagatgctgctagtctgcgtgagatgcttatttcaactgtagaatctttaaagcctccacctgctggacctagtctgtcacagactgaaagttcaatagtggcacttagcatgctcaccaatgcattttgtttctgtccctggactgacatgactcatcgattgtttaaccagatgtatgcctggattccctggatagctgggcaggtaaccagaaactccccagtcccagttcttttactagcgttttcatttccagttttgtttttgaaagattcgtatgtaggttgaggaaacaaatcctatcatgttcgatatttccatttacttggaaggaattcacaatctgctgctcgttggtaactctccttgtccatgaagtcttgacatgtttttccatgccaaataatgtgttggatcgcttgctctataacagttttggatttatcatcttttactgtattcccctttaagcaggtgtggatccacagtatgaatatacaagtaaagggaatgatctggttgccatacaattcttgctgaagcttccttggacgcactacatgctgtttaagacgcctagctctctagtaaagtctaagtgtttatctgtagggatatggacaaagcttggtttacaagacgggagtgattttgatatcttcagttggtctctttctgatgattttgaacaagtgcaagctgtcgctgctatctctatgccactcaaagttcttttctctggtcttggtgcccttcttcatatgttccccaagctggagtaagttgatgagaaaaaaacgacatataatctaagttcatatcgctgtttttgctcaaaattccttttaaaggtgctcctaaagacatagcttaactgtttttttgtcctacattcataggcatttgttggaagaaaaggaattgatgattaagaaggccattcctcagtcacttggcttcttatcttgtctttatggatcaagtactactgactcagagaaaactgcatgccatttactcctacatgaagatttaaagaaagatgagactctgaattctctacttcaagggttccgatgttcaaagtgtgataaatttatcgaacgcgaagatgaaaagcatttcagaatcatagagactccagagatggtgaaattgaagatggatcatcatcgtgattactttaaccttcaatctttatattttaatcttctctatgatgagtcttctgaagagactcagctagcctgcgtagaagtaataaggagaattcttggccacacatccccagatattctggtaagaacaaggtctcaatggatcaggtgccttcaatatctattagttcatgtaaatacagacgtaagggaagcattctgtgctcagattggtatcttcgtacagcatcctattgtgagctgtttgtttcttagtgaagatgctacggagaaaagttgcgaaagaaatttttttaatttgattgagcattctctagcagcagctaaggatcttcttgttatccagactctattggaaacgacagctgaagttatggtagctgttgatgttaccagtgagcttttcttgatttgtcttttcctgctgattgatcagcttgatcatccaaacttgatcgtccgaataaatgcgtcaaagttaataaatcggtcatgctacatccacgtgaaagggggatttgcaactctactttccacagcctctcatattcaaaatgagttgtttgataatctatctgtcaggctgaccagccgtccaaatgtggtaagagaatttgcagaagctgttttgggtgttgaaactgaagaacttgtgaggaaaatggtccctgctgttcttcctaagctcttggtgtattggcaggaaaatgctcaagcagccaataccttgaacgaactggccaagttaatagacacagatgtggtacctctaatagtaaattggctacccagagttcttgcatttgctctgaatcaagaagaggacaagaatttgctctcagttttgcaattgtatcactcacagattggttctgacaaccaagaaatttttgctgctgcattacctgcactcttagatgagcttgtatgctttgtggacattgctgatacacctgagacagatagacggtatgtactcgcatagcttcgtactttttgagcagaaattggtagttggaaatagcctgaaagttttctaaaaattttcttctggtaaattcttcggttcagttgtatctgttggggagcaagccacctatttgctctaagaactagaatttctctgcgtgtgttttgctctttcttgtgctcattcacatttacatgtcaacagaaattgctagaggttgtttgttttttaaagctgtgagaggaaaatgcattcatcattatttaaaaataactgaacgtcctgatgcttttttgttttgtatgacatttgatttcactattttgcttatgcaggctacagagactgcctgatgcaataaagaagatctcaaaagttttaacaaatgccgaggatcttcctggattcttacaaaaccattttgttggactccttaacagtattgacagaaaaatgcttcatgcagatgacatttttcttcaaaaacaagcactgaagcgtattaaactgctcattgagatgatgggccattatctcagcacatatgttcctaagcttatggttctccttatgcatgccattgaaaaagatgcacttcagagcgagggtctcttggtcttgcatttttttacaagaaagttggctgatgtatcgccatctagcataaagtatgtgatttctcagatttttgcggcactcatccccttcttagagaaagagaaggaaggtccccatgtatatttagatgaagtggtgaaaattcttgaagaacttgttttgaagaatagagatatagtaaaagagcatatttgtgagtttcccctcttacctagcataccatctttaggagaattaaacaatgctattcaagaagcacgtggattaatgagcctgaaggatcagttgcgggatattgtaaatggtatgaaacacgagaacctgaatgttagatacatggtggcatgtgagctaagcaaattgctgtataacagaaatgaagatgttgctgcactgattgccggtgaacttgtctcagacatggagatcttgagctctttaatcacatatttactacaggggtgtgcagaagaatctcgaactacagtgggccagaggttgaagttagtctgtgcagattgtcttggagcaataggtgctattgaccctgccaaagtgagagttgcttcatgcagtcgttttaaaatccaatgctcagatgatgatcttatctttgagctcattcacaaacacttggcaagagcttttagagctgcacaggatacaataatacaagactcagctgctcttgccatacaggaactactaaagattgctggttgtgagccatcattagctgggaatgttgttgtgttgaccccccaggagcatgtacaagtcaatgtatctggttctagaagatgtggaggtaacaatgaagtgaaggataggggacaaaaactatgggatcggttctcaaactatgttaaagaactaatagctccctgcttgacttcaaggtttcagcttccaaatgtgtctgaccctggatcagctggaccaatttatcggccttctatgtcattcagaaggtggctatcctactggataaggaaattgacagcatttgcaactggatcccgtgtaagcatatttgctgcttgccgaggcatagtgcgtcacgatatgcagacagctacttatctcttaccatatttagttctggatgttgtttgccatgggactgaggcagcacggcttagcatttctgaagagatcctttctgttcttgatgctgctgcatcagaaaatagtggagtgacaataaacagttttggtgttggtcagagtgaagtttgtgttcaagctgttttcacgcttcttgataaccttgggcaatgggttgacgatgtgaagcagggagtagcactctcatcgtctctgcagtcatcaggtggtaggcaagtagcacccaaatcgaaagaccaggtttcaaactcaacaacagaacaggatcatcttcttgtacaatgtaaatatgtgttggaacttttgctagctattcccaaggtgacccttgctagggcatctttcaggtgtcaagcttatgccaggtcattgatgtaccttgaatcccatgtacgtggaaagtcaggctccttaaatcccgcagctgagaagaccggcatctttgaaaatgctgatgtttcttctctgatgggaatatacagctgccttgacgagccagacggtctttcgggctttgcaagtttaagcaaatcattaaatttgcaagaccagttgttgataaacaagaaatctggtaactgggcagacgtttttactgcatgtgaacaagcccttcagatggaaccaacatcagttcaacgacattcagatgttcttaattgtttacttaacatgtgccaccatcagacaatggtcactcatgttgacggactaatttccagagtacctgagtacaagaaaacgtggtgcacacaaggtgtacaagctgcatggagactcggaaagtgggacttgatggatgagtatcttgatggagctgatgcagaaggtttactattcagtagctcagacagcaatgcctcattcgatagagatgtagcaaagattctccatgcaatgatgaagaaggatcaatactctgtagctgagggaatagctatttccaaacaagctctcattgctcctctagctgcagcaggcatggactcctacacacgagcttatccttttgttgtcaaacttcacttgctaagagagctagaggacttccaggcggttcttaatggggattcatatttggagaaatcatttagtacaagtgatcaggtgttttcgaaagcagtagataactgggagaatcggctcagatttactcaatcatcactgtggacaagggaacctctcttagctttccgaagactcgtctttggtgcctctggtcttggtgctcaagttgggaactgttggcttcaatatgcaaagctttgccgtttggctggacactatgagacagctcacagggcaattttggaagctcaggcttctggtgcacctaatgttcacatggaaaaggcgaaacttctttggatcactaagcgttcagacagtgcaattatagagctacaacaatctctcctgaatatgcctgagggtgttgttgactccactgtaatttcttcgatcaatagcttactgatggctcccccaaatccagagcccacagttcgtaacacacaatctttcaaagaaaaaaaagatgtcgcaaagactcttcttttgtattccaaatggatccatcacagtgggcagaaacaaaagaaagatgttttaaatctgtatacccaagtcaaggaattgctgccctgggagaagggatatttccatttggctaagtattatgatgaactatatgttgatgcaagaaagtgtcaacaagagagctctgtatttagctctgcaggcagtaaaaaaggatctgtctcgtcgaacttaagcactgagaaagcagggtgggattacctgtttaagggaatgtacttctatgctaaggcacttcacagtggacacaagaatctctttcaagcacttccgaggttgttaacactgtggtttgactttggtactatctataaaacaagtggctcagcgggaaataaggaattgaaaagtactcatatgaaggtggtgattatggattgtttctcatagctgttattctattaatacttctcgtattttatatataattttttcttttcttttggcagataatgagtttaatgaggggctgcttaaaggatctgccaacctatcaatggttaactgtgttgccccagttggtttctcgaatctgtcaccagaatgcggatacagtactaatggttaaaaatatcatcacttctgttctacatcaatttcctcagcaagggctctggattatggcagctgtttcaaaatctactgttcctgctagaagggaagcagctgcagaaatcatacaaggtgcacgaaaaggttttaaccaaagtgacagaggccacaatttgttcattcagtttgctagtttgactgatcatttcattaaactatgcttccatggaggacaaccaagatccaaggttatcaatatagcaactgaattcagtgccttgaaaagaatgatgccgctggatatcatcatgccaattcaacaatctcttaccattagcctaccagcattccatatgaataacaatgaacgacactctgccagtgtcttttctggttcagatctaccaactatttctggtatagcgatgaagccgagatactttcttcccttcagcgcccaaagaaggtatgcttttccatttttcatggattgaaagctgtcaacctaatttcatatgattttctgctctgctctctgcttatatctccttttatatgtctcccaatatgcattataccatggcataagatcagtttatcttcaagaaccagtcctgcaatatgcatgtccaatagattatattttttatattcagatcattctgctgggaaatgatggtattgagtatccattcctctgcaagcccaaggatgatctcaggaaagatgctcggatgatggaatttactgcgatgataaaccgcttactatccaagtatcccgaaagcagacgaaggaagctatatatccgcaccttcgcagtagctcctctgactgaggactgtggtctggtcgagtgggttccacatacacgtggactccgccatattctacaagatatatacatttcctgtgggaagtttgatcggcagaaaacaaatcctcaaattaaaagaatatatgatcaatgtgctgttaaaaaggagtatgagatgctgaagaccaaaatcctccctatgttccctccggttttccataaatggttcttgacaacgttttctgaaccagctgcttggtttaggtcacgtgtagcttatgctcacaccacagcagtttggtccatggttgggcacattgttgggcttggtgaccgtcatggagaaaatattctctttgattctacttcgggtgattgtgttcatgtagacttcagttgcttatttgacaaaggcttacaactggagaagcctgagttggtgccattcagattgacccaggcaagaaactgcaaaatcgtttgtttgtgttctgttggtattttgttttcgtttgtcataatagtgaattgttattttccaaaccacagaacatgattgatggtttgggcatcactggatatgagggcatcttcatgagggtatgtgaaatcactctcacagtgttgaggacacatagggagacgttgatgagcatcctggagacattcatccatgatcctcttgtggagtggacaaagtcacacaaatcaagcggagtagaagttcagaacccacatgctcaggtttgcataatcatttaatgattctctttcatgtcagttcatttaccctttcttttttttctaattgcttgagacaaccacatgatttggcaattacagcgggccataagcagcattgaagcccggctgcagggcgtggttgttggtgttccgctaccggtagaaggtcaggctcgccggttgattgccgatgcagtctcacttgagaatcttgggaagatgtacatctggtggatgccctggttctgatgaaaatctctgaacaccagctgttgttaagttcacactacaccagttttcataatgccatttatgttaatacagtaagttgacatgcagataacactatcctatgaaaacatgggtggctacaaatctttttgacatgcagatgttacttgtatcataggctccttgtgcacaaacttcctgtagaagttgaagctaaaacagtacataagccaggtctcgcactgtttcatgattctttgtggagaacggtcagtaacaatagtgttaactggagcggtcttggctgcaaaagttttgaatgcttgaaaggtcttaactgagccgggattttgttggttgctttgatctagctctggtcatgagaaagataggtttgttaaggttaaagtgaagactgatttcctgatagatgatgtttgggtttaggcgatgggaaaatccgaatcggattcgatattagcagcggatcaggcacgtttgctgctagaatggctgaaaagaatctgaatattatcggtattacattaaatatagatgctcctttcagcgaattcatagctacaagagggatttttccgttgttcagagggagtttggattagagattcccgttctatgacaatgtttttgatctcattcatgcttctaacggattggatttagcggttagtagtaaacccgagaagctagagttcttgatgtttgatcttgatcggatcttgaaacccggtggattgttctagttagacaatttctattgcggtaatgatgagaagaagagagttcttacgcgtttgatagagaggtttgggtataagaagttgaaatgggttgttggagagaaaactgatgctgaggtttttctctcggctgttctgcagaagcctgccaggatttgattggtttttttcttctttttaatcaagattttgatcttttcataggttataaaaatttgagctcattacatttttataaatattgattccaagggacaattaaaagtgtggacttgtattttgaggttttgtccgatcctgcatgtttgtttcattgtctgtaggattgtgcaattttgtttggtaatgtcttaacggaactggttttacattaacgggtctaaatcctg

SEQ ID NO: 50 - protein, 2702 aa, Arabidopsis thaliana
MAKDDNNLSSLVHELRERVAASASTPANNLRHSSGDEDALEIRFRAVIPNLLNTYVVPSLGNGREVTAVLKLVGHTARNIPGVFYHGTPSAILPVIARIIPFFAEPEFVPGHGVLLETVGSLLMLLRSNSRKAYRIFFHDALQAIQDMQPIASLHSIEPEVCESHIPFRCFCMSFSGIGGDLPDANKPRDGDGLVLNLLGANRWQPFATCILKLICKCLTEGTLYVQGLIHTSFFKAACSLVCCGGADVQMACFEFATLVGSILTFNILPHVALIQSIILLLSADEGLPVYRNTIYDSTIGRFLTAVYSSCSDAAVKLTAESLVLVLSHALQRTKSEELKASLCSAYVRIVKSCPPCIWKIHCLLELLHLPEPCFQLIECFKAVLIVLGPGCVRVETTKCGSHTSATSDRPVQGINAGKKRHIEDESTYKRKRQKVGDDIRRGVYFAPEFADETDGKDAASLREMLISTVESLKPPPAGPSLSQTESSIVALSMLTNAFCFCPWTDMTHRLFNQMYAWIPWIAGQVEETNPIMFDISIYLEGIHNLLLVGVDPQYEYTSKGNDLVAIQFLLKLPWTHYMLFKTPSSLVKSKCLSVGIWTKLGLQDGSDFDIFSWSLSDDFEQVQAVAAISMPLKVLFSGLGALLHMFPKLEHLLEEKELMIKKAIPQSLGFLSCLYGSSTTDSEKTACHLLLHEDLKKDETLNSLLQGFRCSKCDKFIEREDEKHFRIIETPEMVKLKMDHHRDYFNLQSLYFNLLYDESSEETQLACVEVIRRILGHTSPDILVRTRSQWIRCLQYLLVHVNTDVREAFCAQIGIFVQHPIVSCLFLSEDATEKSCERNFFNLIEHSLAAAKDLLVIQTLLETTAEVMVAVDVTSELFLICLFLLIDQLDHPNLIVRINASKLINRSCYIHVKGGFATLLSTASHIQNELFDNLSVRLTSRPNVVREFAEAVLGVETEELVRKMVPAVLPKLLVYWQENAQAANTLNELAKLIDTDVVPLIVNWLPRVLAFALNQEEDKNLLSVLQLYHSQIGSDNQEIFAAALPALLDELVCFVDIADTPETDRRLQRLPDAIKKISKVLTNAEDLPGFLQNHFVGLLNSIDRKMLHADDIFLQKQALKRIKLLIEMMGHYLSTYVPKLMVLLMHAIEKDALQSEGLLVLHFFTRKLADVSPSSIKYVISQIFAALIPFLEKEKEGPHVYLDEVVKILEELVLKNRDIVKEHICEFPLLPSIPSLGELNNAIQEARGLMSLKDQLRDIVNGMKHENLNVRYMVACELSKLLYNRNEDVAALIAGELVSDMEILSSLITYLLQGCAEESRTTVGQRLKLVCADCLGAIGAIDPAKVRVASCSRFKIQCSDDDLIFELIHKHLARAFRAAQDTIIQDSAALAIQELLKIAGCEPSLAGNVVVLTPQEHVQVNVSGSRRCGGNNEVKDRGQKLWDRFSNYVKELIAPCLTSRFQLPNVSDPGSAGPIYRPSMSFRRWLSYWIRKLTAFATGSRVSIFAACRGIVRHDMQTATYLLPYLVLDVVCHGTEAARLSISEEILSVLDAAASENSGVTINSFGVGQSEVCVQAVFTLLDNLGQWVDDVKQGVALSSSLQSSGGRQVAPKSKDQVSNSTTEQDHLLVQCKYVLELLLAIPKVTLARASFRCQAYARSLMYLESHVRGKSGSLNPAAEKTGIFENADVSSLMGIYSCLDEPDGLSGFASLSKSLNLQDQLLINKKSGNWADVFTACEQALQMEPTSVQRHSDVLNCLLNMCHHQTMVTHVDGLISRVPEYKKTWCTQGVQAAWRLGKWDLMDEYLDGADAEGLLFSSSDSNASFDRDVAKILHAMMKKDQYSVAEGIAISKQALIAPLAAAGMDSYTRAYPFVVKLHLLRELEDFQAVLNGDSYLEKSFSTSDQVFSKAVDNWENRLRFTQSSLWTREPLLAFRRLVFGASGLGAQVGNCWLQYAKLCRLAGHYETAHRAILEAQASGAPNVHMEKAKLLWITKRSDSAIIELQQSLLNMPEGVVDSTVISSINSLLMAPPNPEPTVRNTQSFKEKKDVAKTLLLYSKWIHHSGQKQKKDVLNLYTQVKELLPWEKGYFHLAKYYDELYVDARKCQQESSVFSSAGSKKGSVSSNLSTEKAGWDYLFKGMYFYAKALHSGHKNLFQALPRLLTLWFDFGTIYKTSGSAGNKELKSTHMKIMSLMRGCLKDLPTYQWLTVLPQLVSRICHQNADTVLMVKNIITSVLHQFPQQGLWIMAAVSKSTVPARREAAAEIIQGARKGFNQSDRGHNLFIQFASLTDHFIKLCFHGGQPRSKVINIATEFSALKRMMPLDIIMPIQQSLTISLPAFHMNNNERHSASVFSGSDLPTISGIADEAEILSSLQRPKKIILLGNDGIEYPFLCKPKDDLRKDARMMEFTAMINRLLSKYPESRRRKLYIRTFAVAPLTEDCGLVEWVPHTRGLRHILQDIYISCGKFDRQKTNPQIKRIYDQCAVKKEYEMLKTKILPMFPPVFHKWFLTTFSEPAAWFRSRVAYAHTTAVWSMVGHIVGLGDRHGENILFDSTSGDCVHVDFSCLFDKGLQLEKPELVPFRLTQNMIDGLGITGYEGIFMRVCEITLTVLRTHRETLMSILETFIHDPLVEWTKSHKSSGVEVQNPHAQRAISSIEARLQGVVVGVPLPVEGQARRLIADAVSLENLGKMYIWWMPWF

SEQ ID NO: 51 - protein, 2702 aa, Arabidopsis thaliana; identical to SEQ ID NO: 50

SEQ ID NO: 52 - protein, 2702 aa, Arabidopsis thaliana; identical to SEQ ID NO: 50

SEQ ID NO: 53 - protein, 2703 aa, Arabidopsis thaliana
MAKDDNNLSSLVHELRERVAASASTPANNLRHSSGDEDALEIRFRAVIPNLLNTYVVPSLGNGREVTAVLKLVGHTARNIPGVFYHGTPSAILPVIARIIPFFAEPEFVPGHGVLLETVGSLLMLLRSNSRKAYRIFFHDALQAIQDMQPIASLHSIEPEVCESHIPFRCFCMSFSGIGGDLPDANKPRDGDGLVLNLLGANRWQPFATCILKLICKCLTEGTLYVQGLIHTSFFKAACSLVCCGGADVQMACFEFATLVGSILTFNILPHVALIQSIILLLSADEGLPVYRNTIYDSTIGRFLTAVYSSCSDAAVKLTAESLVLVLSHALQRTKSEELKASLCSAYVRIVKSCPPCIWKIHCLLELLHLPEPCFQLIECFKAVLIVLGPGCVRVETTKCGSHTSATSDRPVQGINAGKKRHIEDESTYKRKRQKVGDDIRRGVYFAPEFADETDGKDAASLREMLISTVESLKPPPAGPSLSQTESSIVALSMLTNAFCFCPWTDMTHRLFNQMYAWIPWIAGQVEETNPIMFDISIYLEGIHNLLLVAGVDPQYEYTSKGNDLVAIQFLLKLPWTHYMLFKTPSSLVKSKCLSVGIWTKLGLQDGSDFDIFSWSLSDDFEQVQAVAAISMPLKVLFSGLGALLHMFPKLEHLLEEKELMIKKAIPQSLGFLSCLYGSSTTDSEKTACHLLLHEDLKKDETLNSLLQGFRCSKCDKFIEREDEKHFRIIETPEMVKLKMDHHRDYFNLQSLYFNLLYDESSEETQLACVEVIRRILGHTSPDILVRTRSQWIRCLQYLLVHVNTDVREAFCAQIGIFVQHPIVSCLFLSEDATEKSCERNFFNLIEHSLAAAKDLLVIQTLLETTAEVMVAVDVTSELFLICLFLLIDQLDHPNLIVRINASKLINRSCYIHVKGGFATLLSTASHIQNELFDNLSVRLTSRPNVVREFAEAVLGVETEELVRKMVPAVLPKLLVYWQENAQAANTLNELAKLIDTDVVPLIVNWLPRVLAFALNQEEDKNLLSVLQLYHSQIGSDNQEIFAAALPALLDELVCFVDIADTPETDRRLQRLPDAIKKISKVLTNAEDLPGFLQNHFVGLLNSIDRKMLHADDIFLQKQALKRIKLLIEMMGHYLSTYVPKLMVLLMHAIEKDALQSEGLLVLHFFTRKLADVSPSSIKYVISQIFAALIPFLEKEKEGPHVYLDEVVKILEELVLKNRDIVKEHICEFPLLPSIPSLGELNNAIQEARGLMSLKDQLRDIVNGMKHENLNVRYMVACELSKLLYNRNEDVAALIAGELVSDMEILSSLITYLLQGCAEESRTTVGQRLKLVCADCLGAIGAIDPAKVRVASCSRFKIQCSDDDLIFELIHKHLARAFRAAQDTIIQDSAALAIQELLKIAGCEPSLAGNVVVLTPQEHVQVNVSGSRRCGGNNEVKDRGQKLWDRFSNYVKELIAPCLTSRFQLPNVSDPGSAGPIYRPSMSFRRWLSYWIRKLTAFATGSRVSIFAACRGIVRHDMQTATYLLPYLVLDVVCHGTEAARLSISEEILSVLDAAASENSGVTINSFGVGQSEVCVQAVFTLLDNLGQWVDDVKQGVALSSSLQSSGGRQVAPKSKDQVSNSTTEQDHLLVQCKYVLELLLAIPKVTLARASFRCQAYARSLMYLESHVRGKSGSLNPAAEKTGIFENADVSSLMGIYSCLDEPDGLSGFASLSKSLNLQDQLLINKKSGNWADVFTACEQALQMEPTSVQRHSDVLNCLLNMCHHQTMVTHVDGLISRVPEYKKTWCTQGVQAAWRLGKWDLMDEYLDGADAEGLLFSSSDSNASFDRDVAKILHAMMKKDQYSVAEGIAISKQALIAPLAAAGMDSYTRAYPFVVKLHLLRELEDFQAVLNGDSYLEKSFSTSDQVFSKAVDNWENRLRFTQSSLWTREPLLAFRRLVFGASGLGAQVGNCWLQYAKLCRLAGHYETAHRAILEAQASGAPNVHMEKAKLLWITKRSDSAIIELQQSLLNMPEGVVDSTVISSINSLLMAPPNPEPTVRNTQSFKEKKDVAKTLLLYSKWIHHSGQKQKKDVLNLYTQVKELLPWEKGYFHLAKYYDELYVDARKCQQESSVFSSAGSKKGSVSSNLSTEKAGWDYLFKGMYFYAKALHSGHKNLFQALPRLLTLWFDFGTIYKTSGSAGNKELKSTHMKIMSLMRGCLKDLPTYQWLTVLPQLVSRICHQNADTVLMVKNIITSVLHQFPQQGLWIMAAVSKSTVPARREAAAEIIQGARKGFNQSDRGHNLFIQFASLTDHFIKLCFHGGQPRSKVINIATEFSALKRMMPLDIIMPIQQSLTISLPAFHMNNNERHSASVFSGSDLPTISGIADEAEILSSLQRPKKIILLGNDGIEYPFLCKPKDDLRKDARMMEFTAMINRLLSKYPESRRRKLYIRTFAVAPLTEDCGLVEWVPHTRGLRHILQDIYISCGKFDRQKTNPQIKRIYDQCAVKKEYEMLKTKILPMFPPVFHKWFLTTFSEPAAWFRSRVAYAHTTAVWSMVGHIVGLGDRHGENILFDSTSGDCVHVDFSCLFDKGLQLEKPELVPFRLTQNMIDGLGITGYEGIFMRVCEITLTVLRTHRETLMSILETFIHDPLVEWTKSHKSSGVEVQNPHAQRAISSIEARLQGVVVGVPLPVEGQARRLIADAVSLENLGKMYIWWMPWF

SEQ ID NO: 54 - DNA, 31198 bp, Zea mays
cttccgttcgaaattaaggagggaaagaaaaagggcaaggccagcgagggccgccgccgagccctccgcccctcccggccccgttttcgctggcggcgatcgcggggccatggcgacctacatcaacgagctgcgcgccctcatcgcctccacctcgacctccactgcgtccgccgagggcgccgggccggcctccgcgcacctcgaggtcaaactccgcgaggtcctcccgaacctcctacgagactacgtcgtaccctcccccaaaggtgagcgcgccgcacccccctccattttcgctccctccgtccacgttagactcccgcggaccgcggttggccttaccgttgccgtgcgccgaggttggttgcagccgccgggagggagctcagggaagtcagcgcaatcctgaagctgatcaccttcacggcgctcaagttccccggggtcttctacaacggtcgcgccgccgacgtcctcagcgtcatcgcccgcatcctcacgttcctcgccgagcccaatttcaggtactgcgcggtcttccttcccctccttttcgcctccgctaaaccctagtccgatcgctccatgcgtttgagtttgcttcgacccgggaatggattgcggatgctattgcagtattaatgtgctattattgggaccacgtgtgctgtacactttcctaaaaaaatggacacggagttatcccgttcaggtgtgcggcggtgttgcatatcgtccatttggtaccaattcgtgcagacatgtgttgcacttaactggaaatctcagtgcctcagaggccaaaggtgcggatgctattgcatctatagcttcttgagaggaaccgacaacaatgatgttgttggtcacttgttctcaaatgctgtgaatcaagaacaagtcaacacaattgttaaagattagggaccttcgtccttcgaagcatcatctcctttcggacataatgatcttcagacgaaggtcgtgaaggacgcaccttcatcattcacgagaataacaattcatagagatgataaatattatccattcatcatatattcatttcatattaaacatatgagatattacattgataccttcggcttcttcgaaggtgttgacgcgaaagtgattacaatacagcgtgaacagtatggtagtactgttcatctatttataggcacgggacgcagcccgggtaaaaatacaattatgaccttaacatttgttcataactgtaatatgaatcattagggactagctagtatttttctcttcgactcaacaacatgcttgatcttcgacaccactttaagtcgaagttgtttctcttcggctataactttagcgttcatcaaggttattaaaacgataaaactttggaacgctcatgggtgaaattttgacttttaaacgacataggaaaaataccaatatatcataatttcagacaataatatgaagttaaataccaaagcagagatgtcagtggcttaccaaaacttcacccatgagctggattgaaccccaaaagtaactaatagactgagtccaaaaatagctaatggtctaaaatgcataaaacactgcattttatagtttataacgccaaaacgctaaaacgtgatttcaatctctaattagagttctgacgtttaaacgtagtttaaacaccatttaaacgtagttttaataacactggcgttcattgttgtcattttcgggctatattttcatcttgaagaccttcgacggagaaagagactcccatcatgaatctttgtttgtgacgaagctcctgtaatattcaacattatgctagaaacaaatggtcagacgtgtttttgaggatcttcggaagaggaaggccccaatagatgtcatctacataaacaagcataaaaatagtgatacctcccttgttgtaaaagaacagagaagtatcagatttggaagcctgaaaacccagtttcaccaacttttcactgagtcttgaataccaagcccttggtgcttgtttgagtccataaatggccttatcgagtttacaaacataatttggtctcaacttatcttcaaatccaagcggctgtttcatgtaaacatcctcctctagaatgccatgaagaaacacattttgcacatctagctgcctcaataaccagcctccggatactgctaaggataagatgtctctgatagttgctgccttgacaaccagactaaatgtatcttcgtaatctatgccgcgacgctatttaaatcctttggctaccaatcttgtcttgtacctaccaagaatgccatctgcctttgttttaattttgtatacccatttacaatctataagattttcactcccttttgtggaactagatgccaagtattgttcttaactagagcatcaaattcagcattcatagcaggtctccaatttttatcagctagagcttcagacaaaccttcaggttctccagtattagtaagacaacaatatccggattcgaggcacaattccatcttgaagccttttacggggacactgatctgtgtagagaacaggagacaacattgattctgaacttccagatataccaggtgttgggggtgttgggttctcatcttctgtcgcttctggaggttcagatgctgcatcagattgtgcagtagtatgctcccgccttttatgccgactctgatagacaatacttggtgttggcttttgttcatacaccttgtcacgttgtgcaacagtaggtcgtggggatgaggtagactggtgagaagatgatgctgaatgtactagaaccatctgagccttgcttgcatttgaatcctgcacatcagtacatatatctccaggagtatttgcattagtatcaactggatgatcattaggcaataaggaagcaactagaaattgatgtcccctattttcaaagttagatgaaggtagcaaggtggaagggagaagattaatctcaacacgtaggcgcacaccaacattagcatgcaattcggtgaaagggaaaaccacttcattgaaaaccacatcacgagagatgtagatgcaccctgtggatacttcaaggcacttatagcctttgtgcattgtgctgtatcctagaaagacgcagtgaacagaccgaaatgcaagtttacgaggattgtatgggtgcaaatgaggccggcaagcacaaccgaacacttcaaggaaggagtaatctggaatttgattataaaggcgttctaatggagtagaaaaatcaaggagttttgtaggagttcggttaataagtgtgggagtgtatagtacacaggaaaaccctagctacaaggatacaaatatagagaaccctaatgggccaagcccatatgcataagcactctaacacccctcgcagtcgaaactctagcgactgcagatgttgagactggaccgaaactttgcaaacaccagcgacgaaagccccttggtgaagacgtcggtgaactgggaggcggtcgggacgtgaagaacgtgaacagctccacaggcgacctgttcgtggacgaagtgaagattgatctcgacatgtttcgtgcgctggtgctggacggggttggtggagaggtagacgacgctgacgttgtcgcagaagaccagggtgctcgtggccagcggactgtggagctcttggagcagctggcggagccaggccgcctcatccacgccgtttgccacggcgcggtactcggcctcggcgctggagcgggagacgaccaattggtgctttgacgaccaggagatgaggctgtccccgaggaacacgacatagcccgaggtggaccgacgcgtgtcgagacaacccgcccagtcgtcatcggtgtagacgcgaagctccgtggtcgaggaccggcgtagaaggagcctgaagtagagggtgccacgcaagtaccgtaggatctgcttcatcgcggtgaggtgcggctcccgagggtcgttcatgtggaggcacacctgctggacgacgtatgcgatgtcgggcctggtgaagatgaggtactgaagtgccccgacaatgccccggtagcctatcggattggcgactggggggccgacggtggagaccttgccctgcgtgtccaccggggccgcgcagggcttgcactcagccatgccagcgcgctcaagaaggtcgacgatgtactgccgctggtgaaggaacatgccctggggacgacggtcgacggtgacccccaggaagtggtggagcgcccccaggtccttcatcgcaaactcctgttggaggtaggagatgatgcgacacaggagcccagggaggaggcggtgagcacaatatcgtcgacgtagaggaggtacgcagtgtccgggccgcgacggaggaggaacatggacgtgtccgacttggcttcgatgaagccctgcgaacacaagaaggtggcaaagcgacagtaccaagctcggggggcctgcttgaggccgtagagggacttgttgagcttgcagaccatgtcggggtgagcagggtcgacaaacccaacgggctgagtgcagtagaccgtctccgtcagggtgtcgtggaggaaggcgttgttcacgtcgagctggtggaccggccagtccctggacaaagcgagagtcagtacagtccagacggtggcaggcttgaccaccggactgaaggtctcgtcgtagtcgacctcgggacgctaggtaaagccccggagcacatagcgggccttgtaccgctctagggacccgtcggcgtgcagcttcatcttgaagatccatttcccggtgaccacgttggcgccatggggacgaggcaccaagtcccaggtgcggttagcctggagagcctcgtactcctcttccatggcacgccaccactgcgggtcggcaagcgcaccacggacagtcgtgggcaccggcggtagggccggagaagaggtcgtggagagaatcaagcgattaggggcccggaggacacccgccgcgcgccgggtgaccatcgggtggatgtggcgaggatctcggtggacgatggtagggtgataggccgggggctcgacgcgtgggcggaccggtgcaccgcgacgaccgcggcgctggtacgtctggatggggtcggtgtagagagacgacggggccgtacgtgacggtgcgggagatgccggagctggacggggctgggcgggagacgccgggccgcacgtggcaacggaggggacgctgaggccgcacgtggctgtgcaggggagggtggcgccggtggggtcgcgcgaggcgatgcacgggacacagaggcctcatgaggctgtgcgggggtgggcgtcgcaggcggggccgcgcggggtggcgtggtggacggacctgcagggaaggggggtacgacagtaggggacacaaggtcgagatcgaggaacacgtggagctcgggcagagaggcagtggaaggagaggaaaaggggaaatccaactcgtcgaagacgacgtgacgagagatgaggactttgtgtgaggtgaggtcgagacactggtaccccttatggtcgggggagtatccgagaaagacacaacgagtggagcggggcgctaatttatgaggagcagtggaggcgagattagggtagcaagcgtacccgaagacacgaagatgatcataggaggggtggatgccaaaaagagtgaagtaaggagtgggggtgggcaatcgccttggtgggcggttgaggaggtcggtggtagtggtgagggctgaggcccagtagtgagtaggaagggaagcctgaaagagcagagagcgcatgacatcgttcattgtgtgaaccatgcgctcagcactaccgttctgaggagacgtgtaggggcacgacatacggaggtggacgccgcgagtgagaaaaaagtcacggggcacattgttatagaactcgcgcccgttgtcacactagacaatccggatggtgcgaccgaactgagtggagacccaagtgaagaagtgagatagggtgggataagtgttcgacttctgacgtaaaggaaaagtccacaaatagtgcaagaagtcatcgagaatgagtaaataatacttatagccaaaaaagttgattacaggggatgcccatacatcacagtgtatcagataaaaaatgcctgctaccctagaagaggaggtggggaatgggagcctaacatggcgacctaactgacaagcatgacagaggtgctcaaaaggtcccctacaaccagaaacagaggtactactagagagcttggacatcacatcacgcccggggtggccgagacgacgatgccaagtcatagaggaggcggccgctgcaagaacaggcggggcagaggtcgatgtaggggaagcaggcaggcgaagagatgttgtgtggactgtcctccacaccacaaaaacagagatgctgtcctccacacgaagaccacatgacttattccatcattctccccctaagtcttgtgcgtcgccttgtgggaaagttgagccatcccggacctggaacaaagctcaaagaacttgatcctcccaaggggcttggtgagcaggtccgcaagctgatccttggtgttgatgtagcgcgccttgatgctctcttctgccaaacagtcacggatgaagtggtacctcacctggatgtgtttgctctcatggaacacggggtttttggccaaagctagagcggactaactgtccacccgccatcgctccaatgtctctcccgaggagatcaccgagcaagcgagcaagccagagcgcctgagttgaagtggtggaggccgctatgtactcggcctcacagctggacatgaccaccacttgctgcttgaccgactgtcagctgatggggcacttgtcgaggaagaataggatcccacttgtgctcttgctggtgtcgatgtcaccggcatggtcgctgtcgctgtacctgacaaggtgtgcctacccagggcacctcgggtagtagagaccgtggtcgagagtccccgcaacatagtggacgatcctcttcacagcctgctcgtgctctgtcgtcggtcgctgcaggaaccgactaacgtagccgacggagtatgctaagtccggtcgtgtgtggacgaggtaacgaaggctccccacaagacatcgatactgtgtagcgtccacctcctccgtcgtgctgccgcgactcaacttcagcctctcctccatcggagtgagagctgggttgcagttggtgagcctagccagctcaacaatgcgcttggcgtaggccgtctagcgaagtgtgatcccagagtcaccctcgtgcacctcaatccccagataggagagatgccccaggtcactcatctggaaggtgaccttcatctcttctttaaacgctgccacctctgcatccttggcaccggtgatcaccaagtcgtcgacgtagacacccaccagcagagcatttcccccattgccctaccgatagatggccgcctcgggcttggcatgaagcccatccccttgagcgtggaaccagcttgacattccacgcccttggtgcctgtcgcaagctgtagagggccttgcgcagacgcaacaccttgccctccttgccagggatcgcaacacctggcggctggtgtacgtagaccttctcctttaagtcgccgttaagaaacgccgacttgacgtccatgtgatgaacatgccagccttcctaggctgccaacgcaaggaggagtcgcacggattccatccgtgccacgggggcgaaagcatcgtcgaagtcgataccctcctgctgtaataaaccgcgtgccaccaagcgagccttgtgcttgacgatggcgccaacttcatttctcttcagtttgaacacccatttaagggtgatcgtgcgatgaccatgagggagatcagcaagttcccaggtgcggtttgcctcaaccgcgtccatccccgactgcatcgcggcacgccaagtcgtgtgtttctcggcctccgcgactgaggctcaccatcgtcgcatgcaagatgcaactctcccgctagaatgcgagacgccaggccccgcaccgacgggtcgatgagaagaccctccaccgtacgatatcgcaacggctcgttgtcgtagcacgcgtcgacgcgctccttgtcgtgggaaagcggggtcacgagctccaccgggtcgtgctcgacatgggctggcgtcggagatgacgttcccggagagggtatcatcggtgttggagtacgtggtgacgaagagctcgctgtagccggagtcgtgtctggattgcgtggtggcgaagagctcattgtagctggagctggagagcgtggcgctggagtcggtggagacttgggggctggggtagacctgctcggagaagagttgcctactcccccggctccctcaaagtggacgtactcgatggtgaagtcgtcgtacgtcggagtcgtgccgtcatccactaccttgtcccaggtccatccttgccctttgtcgaacactacgtcgcgcgtcgtgcgcacacgtagtgttcctaggtcaaggatgcggtaggccttcgtgccctccgtgtagccaatgaacacccccggggtgctcctgttgtcgagcttgccgatgtggccaagctccttggtgaacgcgaggcagccgaagacttgtaggtgagagaccgccaacttgtgcccatgccaagcctcatacggtgtcatcccgttgagtgccttggtgggcgagcggttgatgatgtagaccgctgtcgccaccgcctctccctagaagacatgcgacattcccctctgcttgaggagagcccgagccatccccacaaccgtttggttacgccgctcgatgacgccgttctgttgcgggctgtacggtgcggagtagtggcgctgaacgccctcatccgcgcagtacgacgcgaacttagccgccgtgaattcgctgccgttgtcggtgcgcaggacgcgcagcttgcggccgcactccgcctccgcatggatctgcacacgcttgatggcgttcgcagcctctgccttgttgccaaggaccatcacccacatgtagcgggagaggtcgttgacaagcaacaagaagtaccgtcgtccttctggtgttgctggagtcaccgggccacacaagtccccatgcacgagctcgagcctctgcttagctcggaagctcaaatgctgggaaaggggagccgtctctgctttgtcaacgcacagacatcgcagaactgctccacatagtcaaggcacgatagtcctcgtaccatctccttggtactgagctgcttcatggcctcgaagttaaggtgtccgaagcgctcgtgccactgccatgccccgtcgtctcgacgagcagcaaggcagcaaggttgtgccacctttacgttgaggatgtaaagccgatttggactactgcgtaccttggcaagaaggcgacgagaggggtcctagatcctcatgactccgtgctcaatctccacgcgcgagccgttctcatccagctgtcccaagctgatgatagaattccttaacgcagggatgtagtagacactggtaagcagcctgttctcaccggacgcgacggtgaagacgactgagccggcgcccttgatccctacgccggaggcgtccccaaatttgacggagcctcggaaactagagtcgagctcggtgaagaactcccgtcggctggtcatgtgatgagtgacgccggtgtcgaggcaccatccttcgatcatgtctttgctggagccgtcgccgaggaaagcacgtgctttcgactcatcaaggtggaggagtggcgccgcaactggtgcactggagatagctcaatgcttgcctgtgctaggagcagagcttcctcctccgcctccgcctatgcgacattggcctgaccgcatcgtggctgtcagcagtccctggcctagtggccaagcttgccacagttgtgacagccgtcgtctcgtgccggcttcttgttatcgacgacgccgccttgggcgccttcgcaagcaccaccctcagcttgtcctcgcgccctggcccggttgcctccgcgcgccttgccacatttgcggccccgtgtcgaggaggactcccactttttcttgtcaacctggcacgcctcccactgctcccgagtgagatgtagcttcacgccaatggtgataggcccagagagggcctatggttcgtcgcctcgacgaccttgagacgacctatcgcttcttcgatcgtcattgtggagaggtctagcagagactcgattgagcgagtgatctgcttatgcttctcggggatgcaacagagagtttctcgacagctctctcctcatcgtaggtgtcgtcgccgaactgtaccatcttctgcaatactgcaacagagtgttgagacagagagcaaagtcatcaacatcctcacctggcttgaaggccaggttctcccactccttgcgaagtgcgtgcagtgtggtcttgcgggcacggtcgctaccgatgcgggtcgcagcgatggcgtaccaggccttcttggcagtccgcttctgggaaagcgaaaactgcatctcgggcgggactgcaacagtgagtgcatctagcgctcgtcgatcctcgtagtagtcgacgtcgccgtactgaactgcttcccacatgtggcgaacctggagccgtacctcatcaccgcggcccactcgacatagttggtcttggtgagggtaggtcacccaccgtcgggaccgaagtccctgacaacggcctggacccgcggtgaccatggtactgattcggagagggagagccgcgccgcctatagaggccgcgatctccgtcgacccggccgccgccaccgggagcaccgtcggcgcgtccgcgcccatctaggctgccgccgcgcgtgttctcgcccggagcgccgtcagcgcgtctgcgcctatctaggctgccgccgcacgcccccccatgggggtgcgtagctgcccattgtgtcgcctgctcttgcgctgcctcccttgccagcctgaactcgtcgttggtgttggcgtcgccggaaacatagctaccggcgctactgccgcgcagagcctcgagctctgccgccgctgcacgtgcatcatccgtcgcctccgctgctgccagttctgtcgccgccagccgtgctggcctcgccgctgtcgctgctgctcgctcgcgttcttgtgccgcggcgacctcggcctcctgctggcaccgcacactcgaagtgaccgagtaggagatgtttaggctgcaggataacctgactctgataccaattataagtaatgggactcttactctcatcgagaggattatactacgagttggggcaattttcgatctatttctcacacactactcaaatgccacgcccttagaagggttggggacacatatttatagccctaggggctgcactacattgcactacatactacactacacattgcagcacacatgtgctgtcctctagatgctaaagtgtagtcaaaagactgctgctgctgctgtcctacagcagagatgttgtgcggactgcgctccacaccacaaaaaaacagagatgttgttctccacacgaagaccacatgacttatttcatcactaatgctgggcagaacctgcgctccatagcgcatagttcatcttgctgagttttacgaccacgatttgccctagaaggggtgttgacacaacggtttgggagatggtcgcgattgttggatttggtgatagatggcggctacggttagggtagaggagaggctccgattaccatgtgagaatagcaaccaggattggttaagcgttttctacctgcagagcaggctgcgttgatctatttatatatgcagatgactgccgtggataacaccctaagggctaatttggtgagccgggatcccgggaggatcggaggggattaagggggaaattagttcatttccccctcaatcctcccgagatccccttgtcaccaaatcaaccctaaggggataactctgcctaacaaaatttgctatattttaggctaatctatagcagagttatctcttggatatctacgtagttatcccttagataaactacgtttacatagcataggcctatggccatattacaagcttttcaatctaacatctctaagtttcatatcacgccccgtttggatcattggaattgaattccattctaataatagtaatttagtcatatatcaattaagataattcggttttatacaaaatatatttgtatactattattagcaagatgtcggagatatttatgtgctacatttttactatagaagagtgagacgaagagtgtcatgtaagttacagagtagaaacaaattctactaatgcataaaatcatttctcatcctccaccccatgaatttgagataagcttatatctgaactttggaaagtggtggaatgttaaattctaaactaaataagttagtttactgagtgaattgtaattcctctaaaatgaagggatccaaacgccctgtcagtgtattttactcactaaacatcccacctattgtttacatgtatgttctttcttcacttttgcaggttgagccatgagattatattccaggcagtttggaatcttctctccattctccgcacaggtgatcgtgaagcctacagacaattctttctagatgctatggttgcggtagaaggtatgcattctgttctgttcatcttattctgtagttacagacattgtaggaatatgattagttatgtcatgctgaaagggctgaaacttgatcatgtccaatccaacagacgtgctatatgtggcatcattgcatgacagaagtcttagtggtgtgtctcctggaagatgtttagttaaatgcctatgtggatccttggacatattagacacacctgggccttttagtgagctcccagccagttgccgacctaagaatggacctggcgtgctggttgatctgacaggcgatgcaagatggcgcccatttgccacttcgttgattaagctagttaacaaatgtcttacagacgggaccttgtatgtcgatgggctcgttaccatgccatttgtttctgctgcttgttctatcctctgctatggtgatggttctctgcacaaggttggtatctccgtttgaacagctttaacttttggttatcctttgatatctgaaagtcaatctgttgcaacaggtttgttttgatttcgcacgtattgttgccacggtaatgactcctgagattcttcctctagaaagcatcattcgttcaatcacatgcattttgagccaagaaattagcgaactctctgatatcaggtataattatgttcgtactcattgcttccggttattgaaattactgcactcaattgaggagacataagttggatcttggacacactattgggttattgttacgctggattgtaatttgcatctgttttcttcagctgctttgcatgcgtttttgtttgagagaagatgaacatctgcttgtatccattgattcctgacaaggttacagagtacacttggtctagtctcagtgggagtttcatttacatttaataagctgtcacataagcacttttgatgacgcgacaacatttgtaagaagacagagaagaattgagtttcgtagggattaaactctcttaacacgattaccaactctcaatgagtcatgaaattaaatgtctatggaactatagaatgaaactttccatttgagcgggtggtgtttagtccatgtttcatttcactctatatgacatggcaatcccgataaagtggagatcaatctcaacatgtttcatacgttgatgttgaattggtttgatggagaggtaaacaccattaacattgtcacagtagacaagagtgctgaagggtagcagacggtgaagtccttgaagaagttgacaaccaacaaactttggcaacaccatttgccacagtctgatattcagattcaacactaggtcagaaaagagtggcttgccgtttggacgatcaggagacaagattgtcgccaagtgaaacaatatagcccaaggtagatttacgagtgtctggatagccgacctaatcgacattcatgtaaactatgagcttagagacaacaatcaattgaagaatcccatgggagagagtgccttggatatagcatagaatgtgcttcacaactgacaactggccctctcaagggcatgcatatgtaagcaaacttgttgaagagcatatgtaatatcagacctagtgaaaatgaagtacccctaaaaggttacgatagtgcgtaggatctgtgaccggagctccagcagctgtagatagcttggcgtgagtggcaacagtagtgttgcaaggcttgcagtcgaccatgctagccctctaaataatatccaatgtattgcttctggtctaagactgtgcatatggccgtgcaaaacattgtttgcactgcagactgcactgttcgcagagtggagtttgaaataggatgtgagataggtaagactattggagatagcctaagaacacttcattggattttctctcaactgatactgctgcatttggagcggaggcaacaacgttagaggaaaaccaggtggtggtagggggggggcgcctgttatgactggcatcacctatcaaaggatacgacaacaaaaaaattcagtttgttagattgatttattagtcatttggatagactttgttagctagattttaggattggtttgtcagttatttggacaaattttgttagctagatttgaggttgttaagatggctatatgtagccgcaaagaataaaaaaaagagggcaagcaaggcaacaatttgttgttgagctcccttggctcctagccctcctctctccatcacgactgtaggatgccaggagtattgtccccgcccccctgccctccatacatacgagctaaggagcagtatctctaccaatttggtaccagagatgccaggctccaacagtgccaaggatgacacgacatccacaactgctctcgttgctcagcagtaggcgtcggagactttggccaaatccatggccgacctgcagcgccagctcaacggctttgcaacccagctgaattccctctcatttcacgtggttgccatcaatcagtagttcagtacccaaaagagatatgtggcttctacaaagatatacatgcctatacatgtctctaacatcgaggtcaaatgaaattgcaactaggcatatcacttaattctacctcatgtgaaaatccacgctccgtacggtttcaagtgtaggtttaactttttacagcgcttcttaaaatttgtcatttctagttcttttttgtttctattttacacatgctaattggatgctatcctaaatttctaatcaataaatgtgtcatcattccccatgtattcctcttggggtaagaattagttcccttttgcagggggaaaacagtccttgtaatgaatgaggtcttgaatggcaacattgtctgctacacagctactgtagttcctgtcttctgcccagatctaaaatgattaatatattaaatagaagtagtaacttataacataggttttgttttccccttgtttattggaatccagaaatctgacatgttaccaaaatgctttatcttggtttctgcagagatgcagattatgacttttcaatgggagcgtgcctttgtgcactgcattcttcatgtcctgactatattgttgaatctacagctgctgatattgttaatgttctcaaaagagcagtaaagaccagcaaaagtgcagaacttcaggttcaaggaccaacctgacttactcaggttctatgcacagttccatctgctaacctctactccttttcaggttgcactgtacactgcatacaagagaataattgaactctgctctgtacaagtatggaaaccagaaatccttctgaagttgctcagcttgccaaaaccttgcagcaaactgatccaatgtattcgagcagttattggcaaatttggtcaaacctttttcactctggatgatggtaacagtcaaagcagtcctcaggcaagatctgaaaaaaatgagttgcaaaaagctggccataaaagaataccacagaacgaggaaagcaattctgccaaacgtcagaagataactgaatcaggattttctgctgccactggatttgaaaaagaagattatggctatgcttttctacagtctttaaattcactgattaattgcctgtcaccagacaatcatgagtcttatccattagaccctgatgttgctatagaagtgattagtctgctgtgtatttcattatgtgtttatccgaagacaagtttgtttaccagagtttctaagcaagttctttcctggatttcttggattcataaacaggtaggcaaaaataactgaaacttgcatgtttattgatttagcttgtatgtttttcatcctaaaaattattaatcatgcagacagtccagagaaacctgtattcctttgatgcatcactgtattttgaagctcttcatactgtaatgcttctccaatgtgagtcttttttttaatttagcggcactttgcattttgtgcatgtcttgtactcttgttggccttgtgtgctgcgatttgcttatgatctgtctttgagacatcaggttcatttgtctaggaaaagctctaaatatgtgctacttgatatccctttcaagtgtggtataatacgttgtgtgtagcttagtctaatcctacaaggctctgcttcacattgtcaaagatttggcaggacctctttttggtttttatttttttggctactttctctacaaatcaagttgttatcttgtagacagaatatactattgtgtttaaaaatacagaacaaatgcggggaatgtgagactaaggagtaaggaccacttacgaaacatgtcaaactcgatctgttttgccaaactgaacagaatgatttgcctgtgctcttttccaaatacaacatttgtaataagcactgtactgctatgaaaagtaaccacaaattacccccattcccaaatccgaatgcccagacaagctagcttacttagcatgcacagggagctgtttctggtggtctagattatacacccttgtaattttgcagcagcatcctgtgaacaaagcatctacaactacaagactgcaacattaggacatttaggcttgtaaaaatggtatacataagggatctgtttctccctgacatcagcttacaacgttttaagcttgaggttatgcttgaccttcttgagtgtatggtaatcaagttgtgcttctctttatttcaactttagtagctaacccttttttgtcttaatgttggtgcagtcaatcttcctggacacacgaaactgcttgaagatgactatcagttgattggcgatggtacacattttgttaatccaatatatgctgacctcatcagcatgttgaaactgatatgggatgttggtcatgatgtcactgaaacaagttcaaactacaagatagagtatcttttgatgcaagtctttgctaagcttggcaatagactgaattctggatgtgatcttgaattctttgatttggctatctgtaatggaactgctgagattaaaaatgaagcaattatatcactacccataattgtgctgtattctggtcctaggattcttggagcgatgtttaagaaacttgagtgagtggacttgcttcccctttcatgattattgtagatgagatgtacttttccagttaaagttttgtaataagtttttttgtttgttacccagtacatgtgattctatcctttaagttgtgttcttaaatacaagcagttccatacttccatgatttcatgatgatattcccttgtttgcttgctataggtcagtggatgctttaggactcgagaacgtggggaaacatattgccttttcacttggttttctatcttgcttaaatggaaccacttattacactgacaatgtggggaaggggaaccattgcaagctattcttggacaagcactatgaacaacctgtgtcaacattagatcttctcttgagaggtttctgttgtcctcaatgtgatatcaggaatagaactatccacaatgaagaacaaatttctatagtgaacattgcaccattacaagttgagaatgcggacttcaatattaacatctccaaggcccacactctccttttcaaatttctctacgcagggacttctgaggaatttatagtttctttggttgaagtattgccacggctattgaggcattctaacaggcgtcttctacttgagatgagaactcaatggaatcagtgttttgaatttctactgtgtcatgaaatgaaagctgtcagggaagcattttctggtgtagtctactgcttcttggaagacagtgttatggatattttgttttctggtggactgggaatgaatggagggtctaaagaacttcaattcatggataagataaaatgtgctttcactgaagctgaagatcctcagattcttttgacacttctggaatcaattggtactattgtgacagtcagtgatattcatggacaagttttcttctgctcattcgtgttacttattggccagcttgataatcataatttcatcataaggacgactgcattgagattaattcacagatgctgtgcatactgtttcaaaggaggactagatctcttcctcttgaggtactcacatgctagagataatttatatgactatctgtcatctagacttgtgactcattcagtaataattaaggatttcgctgaggacgttgtaggtattaagaccatagagctgattgagagaatggttccatcagttataccgaagctcattatatcacacccaaacaataaccgtgctatttttactctgcgtgaactggcaagccatctaaacactgagttagtaccactgattgtaaatatgttgcctaaagttctctgctttgctcttttttatgaagatgggcaacatttgccatcagttctgcaattttataagaatgagacaggaactgatagcaaagagatatttgcagctgctttgcctacactgcttgatgaaattgtatgttttcctggtgaatctgatcagcttgagaatgatataaggttatttttttgcattagacacagttcattataactgttaggtaatttcgaacaattttctaataatatattaattttcagggcagcaaaaatctcaccaacaattaagaatattgctagaattctgacaggcagtgaaactcttcctgagtttttgaggaatgattttgttcgccttctcaatagcatcgacaagaagatgcttcactctgatgatatgaagcttcaaaaacaagctctccagcgaataaggaaattgattgagatgatgggcccttatttgagtacacatacgccaaagattatggtcctgttgagtttcgccattgataaggaaggtctccagatgggtggtcttgatgtcttacattttttcataaagcaattggctgaagtatccccaagtagtatcaaatatgttctgtcccaagttgtagctgctttcattccatctctggaaaagtgcagaggatatccttccgcgaacctatgtaaaattgttgaaatcctagaagaacttgttgtaagaaacaatagcttgctaaagcaacatatacgtgaactaccactgttacctagtataccgtctttatcggaagtaaacaaggtaatacaggaagctagagggctaatgacactgcaagatcatctgaaggatgctgtcaatggtcttcatcatgaaagcttaaatgtgaggtacatggtagcttgtgagctgagtaagttattcaatgccagaagggaggatatgactgctcttatcattggtgaagatattgctgatttggatatgataagctctttagttatggctttactaaaaggatgtgcagagcaatcaaggactgttgttggccagagactgaaactagtttgtgcagattgtcttggcgcacttggtgctattgatcctgctaagttaaaggtaagttcttgtgagcgctttaagatagaatgttcagatgatgatctgatttttgagttgatccacaagcatcttgcaagggcattcagagctgctgttgacactacagtgcaagattctgctgccttggctatccaggagctattaaaattggcaggttgccagtcttcatctagtgaagaatcaaattgttgtgagatgagctacaggggccagaagttgtgggatcgtttctcaaactatgtcaaggaaattattgccccatgcttaacatcgaggtttcatcttcctaacacaactgattctgctaaagtcagcccaatataccgccccacaatgtcctttagaaggtggatatactactggattagaaagttgtcatcacatgcaactggatcccgttctagtatttttagtgcatgccgtggaattcttcggcatgacatgccaactgcaatctatctcttaccatacttggtcttaaatgttgtctgttatggtactccagaggctcgtcagagcattactgaggaaattctgtgtgttctcaatgctgctgcttgtgaagatagtggtggggctgctgttcatgaaattgtagtggggcagagtgaggtctgtattcaagccatcttcactttacttgataaccttggacaatgggttgatgacctcaaacaggaaattgctttattccagtctacttatgccatgtctggaaagcatggaggtaaattgaaagatggaacatattctgatcatgaacaggatcaaatgctggtgcagtgtagcaatgttgctgagttgctggctgctatacctaaagttactctagcaagggcctctcttagatgtcaagctcatgctcgtgctctaatgtactttgaatctcatgtccaggagaattccggttcctccaatccagctgctgagtatagtggcaccttttcagacaatgacatatcttttcttatggaaatatatggaggactggatgagcctgatggcctcctaggtttagcgaatctaaggaagtcatcaagcctacaggatcagcttatcattaatgagaaagctggaaactgggctgaagttttaaccttatgcgaacaggccttgcaaatggaacctacctctgttcatagacaatccgatgttcttaattgtttgctaaacatgtgccaccttcaaggcatgatcgcccatgtggatggtttggtttgcagtataccccaatacaagaaaacttggtgcatgcatggagtgcaagcggcgtggcgattagggagatgggatctcatggattcatatctgactgggacagacaagggtctggtgttcagcagttctgagaacaatgcttcttttgacatggatcttgctaagatattcaaggccatgatgatcaaagatcagtttctggtcgctgaaaaaattgcccagtccaagcaagcattgcttgtacctctggctgcggcaggcatggactcatatatgcgtgcatatccttatgttgttaagctgcatatgttgcgtgagttggaagacttcaattccctattgggagacacgtcgtttattgataagtcatttggttcagacgatccaaattttctgaagttaacaaaggattgggagaaccgtctgagatgcacacagccatcattgtggacgagggaacctttacttgctctgcgaagggtggtttttagtcagagtcatatgaatgttcaggttgggaactgctggcttcagtatgctaagctctgccgcttggctggtcacaatgagacagcccaccttgcaatactagaagcagatgcctcaggtgcccccaatgctcacatggagaaggcaaagtatctctggaacatacggaagtttgatagcgctatagctgaacttcagcaaacacttctcgacatgccagcagaagttttgggaaacaccgtcctttcatctctttgtagcctctctcttgctttgccaaatgcacctatctctgcaacacaaacatcgaaagagaatccagatgtatctaaaaccctgcttctttatactagatggatccacaatacagggcaaaaacagagtgcagatatcaaatctctatattctagagtaacagaattgcgaccgaagtgggaaaagggttttttctgcatggcaaagttttttgatgatttgcttgttgatgctagaaaaaggcaagaagataagttcgcttgtaaagtcggaccaatcccttctagctctgcaagcagggcaagtgacgaaaaagagaagccttggtgtgaatttcttccgagagtgctactatgttatggaaaagcacttcacaaaggacataagaatctttttcaagcactgcctcgtatgcttactctttggtttgaatttggaagcatatacgtccgagatggatcttcctccaatcaactcatgaaagagattaatgcaaatgtaaattggttgcacatccttttgaaattcacttttttttttcattctgcataagaaacttaatcagcacattgcaggttttaggcctcatacgtgggtgtttgaaggatctgccaacatatcagtggcttactgtgctgtctcagttgatctcccgcatctgtcaccaaaatgctgatgttgtcagaatggtcaaatgcatcatcacatctattttacgggaataccctcaacaagctctttggatgatggctgcagtgtctaattcaactgttctggcaagacgagatgctgctgcagaaatattgcagtcagcaaagaaaggatgccggcgtgggaatccaaacagtgcactctttagtcaatttacaaatcttataggccatcttattaagctctgctctcatccagggcaagcaagggcaaaaacaataaacatctcaactgaattcagttccttgaaaagaatgatgccactaggaattatcttacctgtccagcaagctttaactgtgactctgccatcatatgattcaaatatgtcggatcaatctggttttcaccccttctcagtctctgaacatcccactatagctggaatagctgatgaagcagaaattcttaactcccttcagaaaccaaagaaggtacgttgagtattgcggtattgccttgcttgattactacattagatgaggagcgactgtttaggccaactaaatttcacatcaaaagccattcttaatttcgttagatgatgaatatttaaagtgtcgtacaaatcgttgttgaatttgattttggggttaaaaggcttgtcgacacttctactacgcgtttgttattctcagagttagctataatcctatgcctatacttcactaggctggttgcaactcaccaacatatcattttgaacttcaggttgttttcctcggaagtgatggggttgaacgtccatttctttgcaaacctaaggatgatcttaggaaagactcacgcatgatggagttcaatgcaatgatcaaccgtctcctctccaaggtccctgagagccgcaggagaaagctctatattagaacttttgcagtggtaccacttaccgaagattgtggaatggtagaatgggtgcccaatactcgtggtcttcggcatattcttcaggacatctacataactcttgggaagtttgatagggtgaaaacaaattcacagatcaagaagatatatgacacatgccatggcaaaatgcctgacgatgtgatgctgaagacgaaaatccttccaatgttccccccagttttccacaaatggttcttgatgagattctctgaaccagctgcatggtttcgtgctagagtggcatatgcacataccacagcagtgtggtcgatggttgggcacattgtggggcttggtgacaggcatggcgaaaatatcctttttgactcgacgaccggggattgtgtgcacgtggattttagctgcctttttgataggggcttgctgctggacaagcctgaggtggtgccgtttaggctgacacaggtaagtagcgaaagcatgcctctctggtatttttttgcgcctttcaagctttgtggatatctgacctatggcatcatttttgctgggcatcaactgcagaacatgatcgatggcttgggcatcacaggttatgaaggcgtatttctcaaggtctgtgaaatcactctatctgttctcaggacccacaaggagaccctcatgactgtccttgagaccttcatccatgatccactcgtggagtggaccaaagttaacaagtctagtggaggcgaagtccagaacccgcacgcacaggtacgatgaatatgcagcagggggcactgcgctcacgtattagacatgtctaagaagtagtaatcaccattacatcagtagcattctgatgtatctcttattgtttacaatccaatcttccagagggccatcaccaacatcaacgcaaggctccagggagttgtggtgggtgttaaagccagcccttccctgcctctctccgtggaaggccaagcccggcggctgatcgctgaagcagtctccctcaacaacctcggcaaaatgtacatctggtggatgccatggttctaagttatacatatctaacaggtcgtgctctctatctctttcccttgctagttattatgtagtgctatgtatatatgcattggtctattggcattttgttatagccctacattgcctgcgctacgcctctgttgctgccctatctagcataacaatgcttctttcatctagtactacttcaactctggcctcttagcacttatagcagtaaaaaatcttagtttcggtccattgggtttggaactgaaacgaatggtagtaggtgtgaccgtggtttgaggcacagccgcacaggcaatgcaagtagccagttgggtatcctgaatgctgattcctatacaccaccgcttcatcagcacacgccgtgtttgatcaaggagataacgtgaggtccgggcggccggcacgatgccaccacctctgacctcgtcgtgctgcggtgctggtgctaccacacaggacaatactgttggcaaactatactagctacaggtgcgtcgtgaagacgaggcaggttgacacgcctgccagtctcctgcggctgcaaacacccacccacctgcgggtccctatcccatcttaaccggccggttcgtcctggatcctgaaccgcatctttctttttcttaattattgttgcgcaagcctgccattcttttacttccttaatattattatcattattataatcccattctatcttgtcctgatggcaactcattctatccgccactattatactcctcctatacgttagcacggccaccgtcttccttgcattagttattattacgattacgcaaaagcacagcagaggcgtctggcctggcctgagacatggacaagaaaagtacaaactttggagtctagattgagcacctttacaaaggtaggttcagatggacctgcagtggacgacgatccgtccacaggacaggtgggttgttcattcctcgcagcagcattagcaatcagttagctgaagacgcggctggctgtttcattaggatttaggatagggcagttacaaattgcagtcaggatgcccctgtcggctccaactacaatactcccgcgttcaaaaaaacatctaattttgttttttttgaaaataacacatcttatatttggttaaatatacataaaagaatactaatatttgtattatggaatgagtatagttaaattgattatgaaatatagatttttagttgatccatctatgtttagattatctccagcagcttactcatacggccataccaatatttaaaactccacactacgaacagtgcagtctacggtatagaacagtgcaaaacagtgcttatgattaaactttggatgaactgttggagtcggccttattagcatcggtactattttttgttacaaatctagatgaaaaacttgatgtgtattctttttcgaacttaggaaataaggtgtgtttttaaacgcaggatgtacatgtactagcatacatcggtccaaaaaaaattgtaattctagatctgatggaaaccaaactaaaaaaatattgttaacatgtgtgactttacatacgcatattatgaaaatatgttccacgatgagttttactatatccatttagtataataaaatatattatatatttttttttgttaaatttgatatatttgtaatttattgttgctgttctagaatcagattgtttttgggacatagtaaggccttgttcgtttgtccaggaatgaatcaggaattattctagctgatcaaaacttatataaattagagaaacaaatcggctaataattgttctatgtctccattcccgaagaaacgaacgacccctaagagtgtgtttggttctccctactttcatgttacagaaaatatttgaatattaattatgagtattaaatatagggtttaataaatttgtcttgttttttatatgtggaattgattttataattatgttttataattaggctatatttaatattcttaatttatcatttaaatattcccgatgtgacagtgaacttaaattggtagctccatatagagaggaaaaagggttggggcagacaaacggctgtacatcgtctttgtctgtgtagtaacagtgggaaagtaatgtatataaactaaattagaggtcagtacgtccatcaatgacgccaaccctgccggcatctgctccctctgtctacaaaggagcgaatggccggctagtcagctttggtccccagcccaacctctcccgccgtgcagagcgccaagagatacgacaagggccactgatctgcttccgtggtgaaatcttttaccgcccttagaaaacggaaacctttcatggaccacggccatggaacgagaaggaacgggagcagcaagcaagaggcggaagagattgcgaaagcgaccctccatgtttgtgcttggatggactgggcagagggagagagaggagggccgaagcaacacagtttggagcctccgggagccccactcagcgccctccgtgatagcgatcattaccgatgatgatgatgaacatatgaggcatgggcggttttctattaccgctccctcgtgtggatttatcatggcttggtattagttgtatcagatacagatcatggaattggcaacgcacgcccttccttgtcttagatacaaccatgaatgagtgagctgaagaacattatatatagtccctccgtttccgttctaaattataatagtagttattataacaccaaaatatggctaataaggaatttaatagtagttattcagtatcgtagatgttattattttattatataatttcagttaaacctgggataatttagctccttgataaaattaggatctaaaaactttagaatgacatataagaagagaggtagtcgccagatgcacccctgatcaattcaatcatcagaagaaaggcagcgagctttgctcttgttaattaaatagaatagtatataggagaaagattcagcagcacagggcaacctttgcatcctgcatgatgctataggacggacggacacgtactgctaacatggatagatcgaagtgggttatgatgggggagatggattgcaaaaaggcctcccaaatctttgccctgcctgccttttccgctactggacctgaactgatactactactgctgctcccacagctgcttaagattaatttattgctgcctcttcttcttcttcctcccatgccatgatgacatgcccctctacaagcagcctccgccatagccagcgttcttgaacagctcctgctttatcgcgtcggcgctgatcatttccctctgcatctgcgataacattgaaggagcaaacttgttgcgtcgcattgccttgcatccaatccgaggacaaaaggagtgtgtgtatggcagcgaaccaatggacaggcggtggtcactacctcggagcaggaggcgtgcatgccgaagtcgttgaagcagctgacgacgcactgctggatgtcgagccctagcgtgtccagcgtgctcaccgtggacagcagcagccccggcttggcggcgcagtagatctccacccgggtgtcgccgccctccttccgctccacgtcgaactgcaggagccatcagcagcatctcagccctcacatttcccccaatcgcatcagcagcatcagcagcttcttcacgtaccttgggggtgttcctggccaccatctcgttggggttgagctcccggaagacgctgagcatgcctggcgcctcctcctgctgctgcccgatctcttcctgcagcagcttgatcctctccagcagctccttcatgtagtcgatcgtgtcgcccaggatcgacgtccggtccatctgcgcaccaccacgcatattttacttctcatcagcccagccgccatatatagatatagagggattgcttctctgttcaaatgtcctttcttggccgaggaggcacaagaaccgaggaaaaaggagagatttttttttttttgccattctcaatctcaccttgctgatcttgggcacgacggagcgtagcatggagaggcggtcgttgaggcgcttgcggcggcggcgctcggccatcaggttcttggacggcatcccctcgaccctcttcttcttggacgccagggccggcggcggcgcagcgccagcgccagcgccgaacgcgccgccgctctccgccaggccgggctccaccttgcaggccccgaggcccgcggcgccgtccaccagtgccgccgacgccgccttgggctcgacgacgtcaaggaaccccatctcgccgccgtagtcaccagcattgggcccgccgaacgcggcggcgccgtagacctcgctgaggcagtcgaagccgggcgccgccgccggctgcggctgcggctgggcgtaggaggcggtgaaggtggggaggacgctgacggtgggcgcctggtggtggcggtcctggaaggtgcagtccatggcggccggggcgaagaagtcccccatggcattgcagtcccaggcgtccctccgcagggagaggatctcctccaggaaggcctgctcgtccagctccatcaccgccttctcgtcgtactcgaagatggcgagagggcaagcacagaaagaggcggcggctatggcttgtgaggagggaggtggtgtggtggggagagggagagagggggatgccagtgccatgggtgggcgagagggtgaggggaggggggttaatatatggggaatggaagggggacaattattccccatgataaatggtgagcagtggccattaaggtatcattagagaagaggggagagagcgactagttgatgcttgtgttgtgttagtatcacagtattcgttcgtttgtttgtttattaattatgaacccatgggtttcactattgatcatgtgtggtctgtactggcagtagcagtagaatgcagagagaggcccccaatctggtttttgttgtattgtgacttgtgaacccccctagggcagaataacagtgataggcctcaggattcgtcctgctgggtaaagctctgtcttgtgatcccatcactcattcatcagttgtgttgtgtgccgatgcccttggtcagtacgtgtactactttagtcgtactagtgtcatagtgtgtaattagtgccacgtacgactgaatgaaggaaggaataggcaaagaggtactgctatggtgactgatggtgatgcacataaataaatgtatgctaattgctgtcagcggcatcgagaggacgacaactacaccagtagtcgtacgccgaccagttgtgtgtgattctgttctttgatttagggggaaaaagaaagaaagaatgacacagatgataccgtcttttcctttccatgatacatcaccatcgcgtagcgaatgtttgaaatacgtgtcccgcagcaccagtatggaaaaacacgcacagttttatttttttcttcgttacgtatctggttctggtactcctacatagtatcatcatgaagctaagcgtaaggcttgtttctttgtgcagcagataacacacacatacgctgtgactgtgaaggaggaggaagtgagtcagtagcagcaagcaagggtccaaaaccatctttctgcacggcacagactttgaaaggctcaacccctcatgactcttgaggcacaggggattcagaggcaggtctgggtacgtaggacagaatagtctgcacacacagaaactcttgtccacaccccacccaccatcccaaactttggtgagtgagtgacatacatgaaccctcgcgcggaatgaggcccgtgattttgcttccccttctacagcccaggtacctctcgctggatacgatgcatgcatggcatggttgcactgactgacagattataaatatcgtatatttcaccgatcacttgtgatctctctgttcatctggttgcagggctaattctatatgttgtggtgctgtgttgggtcatgctgctgatgctagctgcagcaaggttctttttattgcccaaacacaaacagtacctgccggaaagatggaattcctgttgcatatataggggtggaggaaggatgaggaggatgatgaaaaccacgtgtccaagttccccccttctctgcctcctcattgtcatgccagctgaatgcaatgaaacggagtggattgatttctgtgacaaacattttctttagtcgctacgtactaggagcagtcgtgtatacactcttgcaactgctgctacatgttacgtgttcctgatcctacatatgtatatagcagaagcaataatgttctggttctaaactgcaaggagatggtatttgaacgtgaccagatctttattccgcttggaaaatacgcctagttgagagcatgatta

SEQ ID NO: 55 - protein, 2705 aa, Zea mays
MATYINELRALIASTSTSTASAEGAGPASAHLEVKLREVLPNLLRDYVVPSPKAAGRELREVSAILKLITFTALKFPGVFYNGRAADVLSVIARILTFLAEPNFRLSHEIIFQAVWNLLSILRTGDREAYRQFFLDAMVAVEDVLYVASLHDRSLSGVSPGRCLVKCLCGSLDILDTPGPFSELPASCRPKNGPGVLVDLTGDARWRPFATSLIKLVNKCLTDGTLYVDGLVTMPFVSAACSILCYGDGSLHKVCFDFARIVATVMTPEILPLESIIRSITCILSQEISELSDIRDADYDFSMGACLCALHSSCPDYIVESTAADIVNVLKRAVKTSKSAELQVALYTAYKRIIELCSVQVWKPEILLKLLSLPKPCSKLIQCIRAVIGKFGQTFFTLDDGNSQSSPQARSEKNELQKAGHKRIPQNEESNSAKRQKITESGFSAATGFEKEDYGYAFLQSLNSLINCLSPDNHESYPLDPDVAIEVISLLCISLCVYPKTSLFTRVSKQVLSWISWIHKQTVQRNLYSFDASLYFEALHTVMLLQFNLPGHTKLLEDDYQLIGDGTHFVNPIYADLISMLKLIWDVGHDVTETSSNYKIEYLLMQVFAKLGNRLNSGCDLEFFDLAICNGTAEIKNEAIISLPIIVLYSGPRILGAMFKKLESVDALGLENVGKHIAFSLGFLSCLNGTTYYTDNVGKGNHCKLFLDKHYEQPVSTLDLLLRGFCCPQCDIRNRTIHNEEQISIVNIAPLQVENADFNINISKAHTLLFKFLYAGTSEEFIVSLVEVLPRLLRHSNRRLLLEMRTQWNQCFEFLLCHEMKAVREAFSGVVYCFLEDSVMDILFSGGLGMNGGSKELQFMDKIKCAFTEAEDPQILLTLLESIGTIVTVSDIHGQVFFCSFVLLIGQLDNHNFIIRTTALRLIHRCCAYCFKGGLDLFLLRYSHARDNLYDYLSSRLVTHSVIIKDFAEDVVGIKTIELIERMVPSVIPKLIISHPNNNRAIFTLRELASHLNTELVPLIVNMLPKVLCFALFYEDGQHLPSVLQFYKNETGTDSKEIFAAALPTLLDEIVCFPGESDQLENDIRAAKISPTIKNIARILTGSETLPEFLRNDFVRLLNSIDKKMLHSDDMKLQKQALQRIRKLIEMMGPYLSTHTPKIMVLLSFAIDKEGLQMGGLDVLHFFIKQLAEVSPSSIKYVLSQVVAAFIPSLEKCRGYPSANLCKIVEILEELVVRNNSLLKQHIRELPLLPSIPSLSEVNKVIQEARGLMTLQDHLKDAVNGLHHESLNVRYMVACELSKLFNARREDMTALIIGEDIADLDMISSLVMALLKGCAEQSRTVVGQRLKLVCADCLGALGAIDPAKLKVSSCERFKIECSDDDLIFELIHKHLARAFRAAVDTTVQDSAALAIQELLKLAGCQSSSSEESNCCEMSYRGQKLWDRFSNYVKEIIAPCLTSRFHLPNTTDSAKVSPIYRPTMSFRRWIYYWIRKLSSHATGSRSSIFSACRGILRHDMPTAIYLLPYLVLNVVCYGTPEARQSITEEILCVLNAAACEDSGGAAVHEIVVGQSEVCIQAIFTLLDNLGQWVDDLKQEIALFQSTYAMSGKHGGKLKDGTYSDHEQDQMLVQCSNVAELLAAIPKVTLARASLRCQAHARALMYFESHVQENSGSSNPAAEYSGTFSDNDISFLMEIYGGLDEPDGLLGLANLRKSSSLQDQLIINEKAGNWAEVLTLCEQALQMEPTSVHRQSDVLNCLLNMCHLQGMIAHVDGLVCSIPQYKKTWCMHGVQAAWRLGRWDLMDSYLTGTDKGLVFSSSENNASFDMDLAKIFKAMMIKDQFLVAEKIAQSKQALLVPLAAAGMDSYMRAYPYVVKLHMLRELEDFNSLLGDTSFIDKSFGSDDPNFLKLTKDWENRLRCTQPSLWTREPLLALRRVVFSQSHMNVQVGNCWLQYAKLCRLAGHNETAHLAILEADASGAPNAHMEKAKYLWNIRKFDSAIAELQQTLLDMPAEVLGNTVLSSLCSLSLALPNAPISATQTSKENPDVSKTLLLYTRWIHNTGQKQSADIKSLYSRVTELRPKWEKGFFCMAKFFDDLLVDARKRQEDKFACKVGPIPSSSASRASDEKEKPWCEFLPRVLLCYGKALHKGHKNLFQALPRMLTLWFEFGSIYVRDGSSSNQLMKEINANVLGLIRGCLKDLPTYQWLTVLSQLISRICHQNADVVRMVKCIITSILREYPQQALWMMAAVSNSTVLARRDAAAEILQSAKKGCRRGNPNSALFSQFTNLIGHLIKLCSHPGQARAKTINISTEFSSLKRMMPLGIILPVQQALTVTLPSYDSNMSDQSGFHPFSVSEHPTIAGIADEAEILNSLQKPKKVVFLGSDGVERPFLCKPKDDLRKDSRMMEFNAMINRLLSKVPESRRRKLYIRTFAVVPLTEDCGMVEWVPNTRGLRHILQDIYITLGKFDRVKTNSQIKKIYDTCHGKMPDDVMLKTKILPMFPPVFHKWFLMRFSEPAAWFRARVAYAHTTAVWSMVGHIVGLGDRHGENILFDSTTGDCVHVDFSCLFDRGLLLDKPEVVPFRLTQNMIDGLGITGYEGVFLKVCEITLSVLRTHKETLMTVLETFIHDPLVEWTKVNKSSGGEVQNPHAQRAITNINARLQGVVVGVKASPSLPLSVEGQARRLIAEAVSLNNLGKMYIWWMPWF

SEQ ID NO: 56 - protein, 326 aa, Zea mays
MELDEQAFLEEILSLRRDAWDCNAMGDFFAPAAMDCTFQDRHHQAPTVSVLPTFTASYAQPQPQPAAAPGFDCLSEVYGAAAFGGPNAGDYGGEMGFLDVVEPKAASAALVDGAAGLGACKVEPGLAESGGAFGAGAGAAPPPALASKKKRVEGMPSKNLMAERRRRKRLNDRLSMLRSVVPKISKMDRTSILGDTIDYMKELLERIKLLQEEIGQQQEEAPGMLSVFRELNPNEMVARNTPKFDVERKEGGDTRVEIYCAAKPGLLLSTVSTLDTLGLDIQQCVVSCFNDFGMHASCSEMQREMISADAIKQELFKNAGYGGGCL

SEQ ID NO: 57 - DNA, 2252 bp, Arabidopsis thaliana
ctcttctcttctctctctctcgttgagagacactcaatggccaaaaagcaacctttggcgggcgggtcaaaattgactcttttgacctttcattttcattgaacctctatagacagaaaaggatggatttttctgatgaagacgacgacgaaaactgttttggttctcgtttcaacgacggtgtaaatgaagaagaagaagacgaagagggttttgtgtttaacgacgatgttgaagagaatgaagaagaagagggttttgcgtctgatttctataaggctggttctgattggtcttgtttagtggaagatgaagagactgtttcttcttctgtgaagaagatgaaacagtcgaacttgtttcagatttggggtttacaagagaattctcctgatacaacgaagaagatgaaacaaactgatttgtttcagagttggggtttacaaaagccttctcctttcacttcacctgcttcgaattcggcgaagaagacgacgagtgctcttggaaaaaggcgtagagactcttcgtttagcaatgactcgcctcgaccatgtccattttacaagaaacttccaggaacaccgttcactgtggatgcttttcgctatggttgtgttcaaggatgttctgcttatttccttactcattttcacgctgatcattacattggtctcactaaagcttggtctcatggtcctatttactgctcctctctcactagtcgtcttcttagacttagtctctctgttaatccctcgtctattcatccattggagctagacgttgagtacactattaatgggattaaagtcactttaattgaagctaatcattgccctggtgctgctcttattcactttcgtctcttagatggaacatgttatctgcataccggagatttcagggcttctaaacagatgcaaacgcatcctctcctctttaaccaacgagttcatgttctgtatttggatacaacatattgcaatccgagatacaaattcccttctaaagaagatgtgttaagttatgttgtgagaatcacaaaggatttcctcaggaagcaaccgaagactctgattgtggttggttcttacagcattggaaaagaatgtgtttatcttgctattgccaaagctcttggggttaagatatttgcaaatgcttcaagaagacgaatactgcaatcttttggttgggatgatatttcgaagaatctttctacagatgggaaagccacatgtcttcatgttctgcctatgtcgtcattgaaagttgaaagactcgatgaacacttgaagatttatagagaacagtatggagcagttttggcatttaggcccacaggttggacttactccgagaagataggtgaacaccttgatctgataaaaccaacttcaaggggaaaaatcaccatttatggggtgccatatagtgagcattcaagcttcacagagcttcgtgagtttgttcaattcttaaggcctgataagattattcctacggtgaacaatggaaatgctggaactcgcgagaaaatgcaatcatgtttcagagaatggctcagacgctgatttctgaatcccaatatgttgatcattgaagctttcaaaggatgtgtgatgcttctgtaagatcttggttattgcaattggtgaatacagtagattgaaatacttgaaggattcataatattctttgatctagatgttttattcttagttatttctcttatactaatctagtatatgtttcttttttttgtgtgcacactaatctagtatatcttcaagtggctaatttgtttagttatgatggttgggaaagataagagttcagagaaacaatactgtctaccattttacttctctttacctagaagaagggttagcatcacacgagtagacaatgcaaagagggaataagataaccaaatcagattcagaatctggagatagaagattgccattaacctcattgcaaaacttgatttgtcgctgtgtagagaactctgaagagattttatattgtagtcatatttcaaagcaattagctgaatcaccgggaattggaccaatcttcatcttgtctgcactgccctgttgtgaaagggttccttatcttagttgcattgttctgtgagtgatttactgtcttaaaatcgtttatcttcgtgtatttgattgtttcaaagagcatctaaaacaatggatcctatgagttaatataatctctatatatcttttgct

SEQ ID NO: 58 - DNA, 2360 bp, Arabidopsis thaliana
ctttttaccatttttactctcttctcttctctctctctcgttgagagacactcaatggccaaaaagcaacctttggcgggcgggtcaaaattgactcttttgacctttcattttcattgaacctctatagacagaaaaggatggatttttctgatgaagacgacgacgaaaactgttttggttctcgtttcaacgacggtgtaaatgaagaagaagaagacgaagagggttttgtgtttaacgacgatgttgaagagaatgaagaagaagagggttttgcgtctgatttctataaggctggttctgattggtcttgtttagtggaagatgaagagactgtttcttcttctgtgaagaagatgaaacagtcgaacttgtttcagatttggggtttacaagagaattctcctgatacaacgaagaagatgaaacaaactgatttgtttcagagttggggtttacaaaagccttctcctttcacttcacctgcttcgaattcggcgaagaagacgacgagtgctcttggaaaaaggcgtagagactcttcgtttagcaatgactcgcctcgaccatgtccattttacaagaaacttccaggaacaccgttcactgtggatgcttttcgctatggttgtgttcaaggatgttctgcttatttccttactcattttcacgctgatcattacattggtctcactaaagcttggtctcatggtcctatttactgctcctctctcactagtcgtcttcttagacttagtctctctgttaatccctcgtctattcatccattggagctagacgttgagtacactattaatgggattaaagtcactttaattgaagctaatcattgccctggtgctgctcttattcactttcgtctcttagatggaacatgttatctgcataccggagatttcagggcttctaaacagatgcaaacgcatcctctcctctttaaccaacgagttcatgttctgtatttggatacaacatattgcaatccgagatacaaattcccttctaaagaagatgtgttaagttatgttgtgagaatcacaaaggatttcctcaggaagcaaccgaagactctgattgtggttggttcttacagcattggaaaagaatgtgtttatcttgctattgccaaagctcttggggttaagatatttgcaaatgcttcaagaagacgaatactgcaatcttttggttgggatgatatttcgaagaatctttctacagatgggaaagccacatgtcttcatgttctgcctatgtcgtcattgaaagttgaaagactcgatgaacacttgaagatttatagagaacagtatggagcagttttggcatttaggcccacaggttggacttactccgagaagataggtgaacaccttgatctgataaaaccaacttcaaggggaaaaatcaccatttatggggtgccatatagtgagcattcaagcttcacagagcttcgtgagtttgttcaattcttaaggcctgataagattattcctacggtgaacaatggaaatgctggaactcgcgagaaaatgcaatcatgtttcagagaatggctcagacgctgaggttcaactctaggttgatggatgatatattggtaagaaaatcaatggctttggccattctatttctaatattatttcctttttctgcagtttctgaatcccaatatgttgatcattgaagctttcaaaggatgtgtgatgcttctgtaagatcttggttattgcaattggtgaatacagtagattgaaatacttgaaggattcataatattctttgatctagatgttttattcttagttatttctcttatactaatctagtatatgtttcttttttttgtgtgcacactaatctagtatatcttcaagtggctaatttgtttagttatgatggttgggaaagataagagttcagagaaacaatactgtctaccattttacttctctttacctagaagaagggttagcatcacacgagtagacaatgcaaagagggaataagataaccaaatcagattcagaatctggagatagaagattgccattaacctcattgcaaaacttgatttgtcgctgtgtagagaactctgaagagattttatattgtagtcatatttcaaagcaattagctgaatcaccgggaattggaccaatcttcatcttgtctgcactgccctgttgtgaaagggttccttatcttagttgcattgttctgtgagtgatttactgtcttaaaatcgtttatcttcgtgtatttgattgtttcaaagagcatctaaaacaatggatcctatgagttaatataatctctatatatcttttgct

SEQ ID NO: 59 - DNA, 2218 bp, Arabidopsis thaliana
ctcttctcttctctctctctcgttgagagacactcaatggccaaaaagcaacctttggcgggcgggtcaaaattgactcttttgacctttcattttcattgaacctctatagacagaaaaggatggatttttctgatgaagacgacgacgaaaactgttttggttctcgtttcaacgacggtgtaaatgaagaagaagaagacgaagagggttttgtgtttaacgacgatgttgaagagaatgaagaagaagagggttttgcgtctgatttctataaggctggttctgattggtcttgtttagtggaagatgaagagactgtttcttcttctgtgaagaagatgaaacagtcgaacttgtttcagatttggggtttacaagagaattctcctgatacaacgaagaagatgaaacaaactgatttgtttcagagttggggtttacaaaagccttctcctttcacttcacctgcttcgaattcggcgaagaagacgacgagtgctcttggaaaaaggcgtagagactcttcgtttagcaatgactcgcctcgaccatgtccattttacaagaaacttccaggaacaccgttcactgtggatgcttttcgctatggttgtgttcaaggatgttctgcttatttccttactcattttcacgctgatcattacattggtctcactaaagcttggtctcatggtcctatttactgctcctctctcactagtcgtcttcttagacttagtctctctgttaatccctcgtctattcatccattggagctagacgttgagtacactattaatgggattaaagtcactttaattgaagctaatcattgccctggtgctgctcttattcactttcgtctcttagatggaacatgttatctgcataccggagatttcagggcttctaaacagatgcaaacgcatcctctcctctttaaccaacgagttcatgttctgtatttggatacaacatattgcaatccgagatacaaattcccttctaaagaagatgtgttaagttatgttgtgagaatcacaaaggatttcctcaggaagcaaccgaagactctgattgtggttggttcttacagcattggaaaagaatgtgtttatcttgctattgccaaagctcttggggttaagatatttgcaaatgcttcaagaagacgaatactgcaatcttttggttgggatgatatttcgaagaatctttctacagatgggaaagccacatgtcttcatgttctgcctatgtcgtcattgaaagttgaaagactcgatgaacacttgaagatttatagagaacagtatggagcagttttggcatttaggcccacaggttggacttactccgagaagataggtgaacaccttgatctgataaaaccaacttcaaggggaaaaatcaccatttatggggtgccatatagtgagcattcaagcttcacagagcttcgtgagtttgttcaattcttaaggcctgataagattattcctacggtgaacaatggaaatgctggaactcgcgagaaaatgcaatcatgtttcagagaatggctcagacgctgaggttcaactctaggttgatggatgatatattgctttcaaaggatgtgtgatgcttctgtaagatcttggttattgcaattggtgaatacagtagattgaaatacttgaaggattcataatattctttgatctagatgttttattcttagttatttctcttatactaatctagtatatgtttcttttttttgtgtgcacactaatctagtatatcttcaagtggctaatttgtttagttatgatggttgggaaagataagagttcagagaaacaatactgtctaccattttacttctctttacctagaagaagggttagcatcacacgagtagacaatgcaaagagggaataagataaccaaatcagattcagaatctggagatagaagattgccattaacctcattgcaaaacttgatttgtcgctgtgtagagaactctgaagagattttatattgtagtcatatttcaaagcaattagctgaatcaccgggaattggaccaatcttcatcttgtctgcactgccctgttgtgaaagggttccttatcttagttgcattgttctgtgagtgatttactgtcttaaaatcgtttatcttcgtgtatttgattgtttcaaagagcatctaaaacaatggatc

SEQ ID NO: 60 - protein, 484 aa, Arabidopsis thaliana
MDFSDEDDDENCFGSRFNDGVNEEEEDEEGFVFNDDVEENEEEEGFASDFYKAGSDWSCLVEDEETVSSSVKKMKQSNLFQIWGLQENSPDTTKKMKQTDLFQSWGLQKPSPFTSPASNSAKKTTSALGKRRRDSSFSNDSPRPCPFYKKLPGTPFTVDAFRYGCVQGCSAYFLTHFHADHYIGLTKAWSHGPIYCSSLTSRLLRLSLSVNPSSIHPLELDVEYTINGIKVTLIEANHCPGAALIHFRLLDGTCYLHTGDFRASKQMQTHPLLFNQRVHVLYLDTTYCNPRYKFPSKEDVLSYVVRITKDFLRKQPKTLIVVGSYSIGKECVYLAIAKALGVKIFANASRRRILQSFGWDDISKNLSTDGKATCLHVLPMSSLKVERLDEHLKIYREQYGAVLAFRPTGWTYSEKIGEHLDLIKPTSRGKITIYGVPYSEHSSFTELREFVQFLRPDKIIPTVNNGNAGTREKMQSCFREWLRR

SEQ ID NO: 61 - protein, 484 aa, Arabidopsis thaliana; identical to SEQ ID NO: 60

SEQ ID NO: 62 - protein, 484 aa, Arabidopsis thaliana; identical to SEQ ID NO: 60

SEQ ID NO: 63 - DNA, 2298 bp, Zea mays
agtaccctactgcttccatcaaggagaactgcaactggaagcgggtgcgagcgactgcgatccggacgaggggagggacctgtccgtaatttcggaaaggagcctgggggagaatgccgatagacatgccgcggggtctccccttcgccgtcgacacgtgggggtcctcctcccgaagccggcgccaccgcttccttacccacgcacaccgggaccacctcgtcggcgccggtgcggacatcgatgggggagggatcgtctacgccactcgcctcaccttgcacctcgcacttcgccactttccccagttggggagttgggagttcgtggagatggaggtgggaaggacgttggtggtggatgatcccgtcggcgccttctctgtcaccacgtacgacgcaaatcactgccctggggcagtcatgttcttgtttgagggtcaatttggtaccatacttcacacaggggactgtcggcttacaccagattgcgtacagaatttgccaatgaagtacataacaaagaaaggaaacgagaacatttgccgacttgactttgtattcctagattgcaccttctccaaatgcttcctcaagctaccgagcaaggactcagcaatccgacaggttatatcttgcatatggaaacatctgcatgcaccatttgtcttccttgcttgtgatctgcttgggcatgaagatatactagttgaggtgtcaaggactttcggaacaaaaatttacgttgaccggaaattggattgttttaaagcactctcactgacagcccctgaaatcatcactgacgattcatcttctcgctttcagatggttgggttccaccaattacatgatagagcaagcaaagagcttgcagaggcaagggcaaatctccaacctgaacccttatttattcgtccatcaacacaatggtatgcaacctgtgctcgaagcccgaaacccagcctaacagaagctgagcaggatgagcttggcatctggcatgtttgtttctccattcactcctctcgtgatgagttggagcaagcactacaacttctccaacctcactgggttatttcaacaactcccccatgctttgccattgagctgagctatgtaaagaaacattgtttcaagacccgcttaacagctgatgatccactctggaaaatattcagagatcctctgggaaagtcagtgtcctccccttgttcagtgcttgcgacacagacagatgaaaataactcaaattttgttgttgatgatgaccattcttcttcctctagcgatggatgcacatacttaaatgtaataagcactcttgaactgaaatttgtgccacctcaaccacctgaagaaccggacattacattgtttggaagagcaaggtttgcctctcaagcaattgactttatgaaagaagattacattgccttagaagaagccagggcatgtgcaccaacagattcggttcatggcagtagtgaagaagtcgaaacatattctggaatggatttcggtgtgaaacaaccaccagcctcccagcaggatctcatggaagttggagatgatgtttctttcaaaaaagttggagatgatgtggattcctgtaagcatgaagtaacctcaacacaattagaagggtttcgagtcaagtcattacctactgttcaaagcaatatgttagtggtgtctgatcaacttgaaaggtcagaagttgtaggagagtcaaaattattgaaatccacggaagacttaaaccttaccattgtcagaagtgcagaaagaactgattgtcaaaaggaacctttgtgctatattggatcatcgaaatgtttgaatgcaagtttgaagaggttttacaggtcaaggaatatccctgttcctagacctcttccatcgcttgtcaaacttatggagtccactaaacgggtcaaaatacaaccaaatactaattatactttgttgaactcacgacacagcttaccctaatgaatgattgagcttatacttggcatattatgatagccaaaattttcagatttatgagtatatgaatggattatttctgaagaggacacctgtatattggttattgtgataaccaaaatactcggattctattgggtatacaggtatacttggactggttccgaagaagatacctgtttagtattgatccagatccacacttatacaggagctttgtacgattctcaaactgttgtacagaaaattgatgtaattacatgatgactctattggataatccgaagtgtattattcttctgcaata

SEQ ID NO: 64 - protein, 626 aa, Zea mays
MPIDMPRGLPFAVDTWGSSSRSRRHRFLTHAHRDHLVGAGADIDGGGIVYATRLTLHLALRHFPQLGSWEFVEMEVGRTLVVDDPVGAFSVTTYDANHCPGAVMFLFEGQFGTILHTGDCRLTPDCVQNLPMKYITKKGNENICRLDFVFLDCTFSKCFLKLPSKDSAIRQVISCIWKHLHAPFVFLACDLLGHEDILVEVSRTFGTKIYVDRKLDCFKALSLTAPEIITDDSSSRFQMVGFHQLHDRASKELAEARANLQPEPLFIRPSTQWYATCARSPKPSLTEAEQDELGIWHVCFSIHSSRDELEQALQLLQPHWVISTTPPCFAIELSYVKKHCFKTRLTADDPLWKIFRDPLGKSVSSPCSVLATQTDENNSNFVVDDDHSSSSSDGCTYLNVISTLELKFVPPQPPEEPDITLFGRARFASQAIDFMKEDYIALEEARACAPTDSVHGSSEEVETYSGMDFGVKQPPASQQDLMEVGDDVSFKKVGDDVDSCKHEVTSTQLEGFRVKSLPTVQSNMLVVSDQLERSEVVGESKLLKSTEDLNLTIVRSAERTDCQKEPLCYIGSSKCLNASLKRFYRSRNIPVPRPLPSLVKLMESTKRVKIQPNTNYTLLNSRHSLP

SEQ ID NO: 65 - DNA, 5719 bp, Arabidopsis thaliana
tccacgtaagcaaaaccaaaacaaattatagacattattatgatcggagttgactcaaaatcttcgtcgacgacttttatcgaaacaatggttgaatcggagaaaacgaaacacacttgtctccgtctcgaaatctccggcgccgatccaattttcgtcaaaggcacttggcataattctcgtttcgatatctccgtcaccgatggttcctcctcttggatttgcaatggtaaacaaaaaaaccctaaattcacactatcacttagcctctagcgtttttcgaatctgatttttattttggttttgctcgaaattgaagcgacggaggaggaagtggcggagagagcagcacaatgggaccagcctgtgtcagagtatttaaagctcgccgagcaatacttagggtttcaacaacctaattcggtctatagtttctccgatgctctagagggatctaaacgggtcagtgatcttcttattggatcattcgttagtgttttgaagtaagcctgagatttttggatgttgttgttgtctttgattgtgttttggttaaagctctcttggacgtttgagaaggaagggactaaacttgagtggaggtggaaatgtaaaccatcagatgatagcaagaagatcactgttgggatcttggattttcttatggaggctaacataaggctaagtgtatgactcttatactgtacgttctgaattgtgaggatttgttgtgatgtttgagaatgatgatgaattagagcttaagttctttgatctatgctttgttagaaatggcaatttgatttgtgtttggaagatatgtgtcaatctctcaatactttagtgtttacacaggaagaagtggtgaacaagacgagatcttttgagaagatgagaagtgaagctgagagatgtctagcgcaaggtgaaaaactctgtgacgaaaaaacagagtttgagagtgcaacttatgcaaaggtatgaattattcgatcaccttggttactctgcttaatatccacatcgtggtttgttcttgcttaaactagagtcattggtttttatgatctgttagttacttcttttttttgtcaatgcagtttctttctgttttaaatgcaaagaaggcaaaactgagagcactaagggacaaagaagattcagtgagagtagttgaggaggaagagtcgacagacaaagctgaaagctttgagagtggaagaagtgatgatgagaagagcgaggaagaagcctcaaaaaaggcaacaagcagcaaagcccgtggcgggaagagagctgcacgaagctaagagattgccctgccgtgagattttcaggtcagagtttccattccaagttttgtcaaactcatagctaggaaaattgtttgtcaaaccttctttggtttaaaaaaataatttacaatttgtattacttctgaaagtaaatgcaataacttagagatggcatgattgattgttagaaagcttcaagccccaaattgtgataactaagaaacatagaccatcacacgaaccatattttattaccaaatggtgagaaaatattacaaacataaaattacaaagcaaaagaaaaaaaatcacaaagacaaacacatgacgaggtagtttctcgacaacaacttagatgaatttttagaggaactgtgagagatagtgttaagaagtacctatggtggttttgcgcttgtttcgacaaaatttcgccataagccacttgtgcttgtatgaagtgaaaatatgtccaatcactaatccacaaaacacaccaggtccaaatgctattgcagctgctatccagttcagaactgtctcttccggttccaacaaaggttcctcggggtgcagcgatgtaggtatggggacatgggtttctccacaaatttgatcgagtccatagagtctgggattacccatgaatgaagaacaattttgacttccaaactgtgtgctttgtggcaccaatccctctagatggttgtgggagaagttgatgttggagagaaacgagagtttcccgagacctcgaggaatttcacctgacaagttgtttcgcgataggtctagcgtctcgagctttgtaatactagccaaagatggtgggatgtttcctgtgaatgcattgcctgacaagttgagatgaagcaattcgctcaatagaccaatggatctagggatatgtccagagaatcggtttccagaaaaatctatgactttaaagcctccaaagatttgttcgaaatctgtgtctactcctttatacaccaaatcaattgaatcttgatgattatcatctcccatgtagtttgaccctggtatagctatatttcttttgtaatcaagtgtgagcataggtcgttgccataccgatgacatttcagtccagttggcaaaatagtcttgtggcaatgatccaacgaagttgttattcgatatgtccatgatccgcatgcttggaaagcctaagtaggcagaggccttatagactggaccatagaatgtatttgatcggagcacaagaaccgttaggtattgtagagatcccaaccagactggaaacgtgtctttgatcttgtttcctctcacattaagatattccatccactcacagttgatgaaagattctggaagtttccccaccaaattgttgaggctgacatcaagtgatcccaacattgagccatccatgcagaagtctggcataaatccacttagactgttgtttcgcagatttaacatgtagaaatcagtggaattcttcaaacattgtggaattgagccattaagatggttgttggaaaaatctaagaaggaaaaaaatctgaagttgcagatccattggggaattggtccttggagggaatttgagctaagatcccaatctctttctaatgattcatccccaagttctagaattctgccgaaactgttgaaagaattataagaaagatccactgaatctaacttagaagatctccatatacattgaggtacatgaccttcaaacttgttgtaggaaagatcaagggaactgaggttgactaattttgatatagagctagggactcgtcctccgaaatcgttgtggctaagatctaaatgttcgagattgactaatttaaatatagagctagggacttgtcctccgaagttattatggctaagatataaaccatcgagattgactaatttcgatatagaactagggacttgtcctctaaaattgttgtggctaagctctaaatgttcgagactaactaatgtagatatagattttgggattagcccatcaagattgttgtagctaacatctaactctgtcaacttagatgacgaagtggtattcccaaaattaataggtccttcgaattggttttcacttaaacaaatatcgactaacgaaggaatcatgagcaagaatgagggaaaaggtccaaaaaatgagttctcagacacccaaaatcgctctaagttgtggagttgactaaggtcagcagaaatcgtggagttgaagtaattggaggagaggtctacaatggacaagctagttaagttggataatactatatccccacccgtgaattgattttgacggaggtgcaattcagaaagctttgttaagttggcaaatgaagtaggaatattacctccgagagcattaacccaaagatctatgtattctagttggtttaggttacctatcgaaaccggaaattcacctactaattgattgaaagaaagatcaagatatgtgagatgagaaagatttccaattgaagaaggaatctctccttggagattgcaatgtgaaagctctaggtgacgaagatgtcggagtttaaaaagactactgctagatttcaaagaggtgttggcaatataggaaacgagattaagtgatatcacctctcctaatgtagcatcacatgtgacaccctcccaagaacaacaatcaacggtcttgttccaagaaagtgttgttacatgatggctcccgttggaatggatcgggaactctttttttagctccaaaagagcatctctttggtcgctgcggcacaaagaccgtgtgggagaagcgaaagtgtttggtaaggaaagaagaaagaaaaagaaagagatggtaataataataccaagaaagcaacgagattggtttcgaaccatcgcctctcaattttgttgtttggagacaaagataaattgtttgttgaatggtaagtgatgaacatgtttgcttacacactattctttatataaaaaaaattctctgtaaggagcttgacttggcaagtcttccattacattatttgtaagttaaatcaaggagggagcttagttttagtgcataccaaccaaagctttagaaatgtaaaagccaaaaaacgcacaaaaaaaataccaaaaggagataaaaacaaagatgtatgtccaagtaatgtcgtgaggaatgggtttggaattactcaggtcatgtggttgacatatttctatatgccgcaacatctttttctttttatcaatatttttgcaagatttttaagtaatattttgtataatctatgaatcagtttcttatataatataatttatcatatcattgttttggtccattactcttaatttagaaagaggtaataataatattaagaaagcaaccagattggtttcgaaccatcgcctctcaattttgttgtttggagacaaagataatttgtttgttgaatggtaagtgatgaacctgtctgcttacacactattatttatataggaacattctctgtaacgagcttgacttggccagacttccattacatgagcttgacttggcaagtcttccattactttattttaagttaaatcaaagaaaaagccaccaatcaaagttttaggtgtgtgtaaaagccaaaaacacgcaaaaaaaaatataccaaaaggagatactaacaaacaagtatgttgaagtgatgtcgtgataaatgggtttggaattattcagctcatgtggttgacatctttcttaatgccggaacatctttctgttttcttttttcattttttgtcagcattttttgcaaaacttttaagcaatattttgtagaattaatggatcagtttcttatataattgatcgtatgtatcattttttttgtccattactcttaaatcatttttcatgtaatgattttgacccttaagttactctcaagtctctacaatccaaaattttcactcgtccttttttttttttgaagaaactttttaatgcccactaagttgtataagacgaagcgtctaagtaacgtagatagaatatcactgttcgatcattcgtaaaccctctaggttgatgttagtttaaccatgttcggtggtggagagataaagaaccttgatcgtccattaacattttaggctaaatctctttttcaaaaatgcaggaatacatttgtaatcctggtaggtgaatcggtggagcttctttccctagacgggcagatatattagttcagcagctggagaatctcggcactcaccttaatccgcggcttcagattcttcctcatcgaaccaccaagaaaatgatgccatcttcatcctcaaaatgttgagacttgctttgtcaatgtttttttgatagagcataagaattgttagagtactgatcaaacttgcttatttggtatcaatactct

SEQ ID NO: 66 - protein, 264 aa, Arabidopsis thaliana
MIGVDSKSSSTTFIETMVESEKTKHTCLRLEISGADPIFVKGTWHNSRFDISVTDGSSSWICNATEEEVAERAAQWDQPVSEYLKLAEQYLGFQQPNSVYSFSDALEGSKRLSWTFEKEGTKLEWRWKCKPSDDSKKITVGILDFLMEANIRLSEEVVNKTRSFEKMRSEAERCLAQGEKLCDEKTEFESATYAKFLSVLNAKKAKLRALRDKEDSVRVVEEEESTDKAESFESGRSDDEKSEEEASKKATSSKARGGKRAARS

SEQ ID NO: 67 - protein, 264 aa, Arabidopsis thaliana; identical to SEQ ID NO: 66

SEQ ID NO: 68 - DNA, 4799 bp, Zea mays
cctcgttgaggtcgacagcgacggccatggcggcggcctcttctgcggcgccggcgaggcacagctgcgcaaagctctcggtcccagtggaggaccccaaagcagtgacggcgggcggtggcaccgtcttcgtcaaagccacgtggctgccgtcccgcttctccctcgccgtgaccgatggtgccggcgcctgggtcgccgacgcctctgaccacgaggtgcgcctccgcgccgagcagtgggatcagcccgtcgccgattacatcgcccttgccgagcgctacctcgctttccaacagcctggttccacgtattccttccatgacgccggcaaaggccaacgcagggtcagtccgttcggctcttctcgcccaattagtccattttactgtgcttttgagtacgtacgtgctgttgagtagattgaattagttagctcattctaggcgaggtcgaaaagctgacctattccatttcacatggacgcaagtctgcaaggtggttattccaggtttaaccttccacgtttgatcctcatttaggtcattttgcccatgcttttagactcagagtagtgcagatgccagatgatgttaaaaggatatttcaagtcttcttttccttagttcacacaactcgctgattttcgtctgaaatgttggattttcgtccgaaatgttgctcttccaactgtgtgtgaaacgcttttgtatttctgttatgcaagtaatagaaatggggaaatctccgttgaaaaaaaaatgttggattcggacctttcgagggcaaggacctaccaatccgttcttaaattgaaggaccaaacaggtgtcaaggggtgaatgggagccaatagattttcactcggcttacttcctgatttggttcctgagtgatcatatggaccaaaaacccacacatgctagttgaatagatgtattaaaaatgttcagagaacacaacgtatcttgcgggtgggaggggattttcataaaaaggtactgctgttagatttaacatgaacgccctagatttaaaatgtgcacatgaccaccgtatccctttgagcacaagatacgttgccaaaagattagaattaagaagaaccagagaaaggctcacaaaacagagtaaaatggacgtcctcgggtgcaataccgtattctccggtatgaatatagacccctagtataagaaatgagtccagcagttttcagcatgaacagttttggggaaaatcccaaaaccctatcgaactgtgtccaaaaatcatgaaatttgaaccacatactcagcaccataggcaagattctcaccaaaaagcagctcaaaattccaatgtcttcataccggatcatccggaatttatattggaccatcagttatttacgaactacacgttggaaaatttgacctaaagatcaaaactgcatcaaatcatatccgattgatctcaaactttgcacaaggttccttgggttgttggccagatatcctcaacaccaacacctggaacaactcacaactccacatatctaagaatccatcaaacagaattagtttttctcaattttgctccaaaagatgaatctgcgtgctcatgagggatctgcccaaactatttggcagggataatcttcagtgtcctaacaagtatccatgcaatcaaaccaccccaaacttgttgcaacgcaagatcaatcaaaacagagaagagaaggggaaggaaaaaaacaaatccgaaatcaaagcaaacacatgagctatgaatttcagaggaaagattgctttgattcaaccctcacggaggttttctatgctaaccctgcaagagggagttccactaaggattaggacaatggtcctattctacgttgatccctttggattcgacgttcgggccccaatcgggattcgggacgacgttctcgtttcacgttttgggataaagttctcggtagggggagcgtaggcatgtttcacgttcttagtatcttagggtccaactcaagatctatatatctgatggccacgtgctcttcacgactttgcttcgcatcgacgcaagcttcaggatgatgcctcgtgctacctacaattcctgtcggaactccaccggtgtttttaggcccaaccccgagaaaccgtctgtccggtggttttgaggcccataccagcaaacccctcatgtgtagcgtatcctatatgccccctccacgatctcgacttgtgtcaccactagtcctcgaccgcccgatcaccaagtcctcctgcacctccgcttgacttgattgatcaccgtctcagcttggtcaacacggtctactccaccatgtacacttgtgcttgtcggtgactccaagtgtcagcctcctgcgattgatcctttggtttttctagtcccttggttcaagtcctagtgaccgtccttcatcgttgccagtccatcggcatgaactgcttgaccttcatcttcgtcattaatcaccgcctacgcacaagttaagaaacatgttgcccatacactcacgccatggttagttaaacaactcaatctaaggcccacgatcatcttcttgataatcactcaacatactctgagcaccgtgggcacatatcaccacatgtttgcaaattcatatgcgtctagccgtctacactgaccaatttgataaaaacattaatgagttcttcagaaaattaagtcataaccattgttagattaatgtgccactgtatgctgatttaataatacttcgccatctgctgacctttcagcaaacgttttgtgtggtactcattactaatgatggccctctgcaaacttgccacatacgcctttcaaaaataagaaggataggtggccatctttttcatttacaaaggtcaccagacagcatttacaattccaatagtttcggatcataacagtaagacaatttgaggtacggtcaaccacagttgagatggaactaagggaccaaaaaaagttcagtcaatagaccaactttcagaggttagcatatagaacaggacttgaaagtgaaaagaacttttatcatagtatgtgttcaccaccacctctaatacacatttggttgtcttgattgtgaaaagaacttttatcatagtgtgtgctcagttgctcaccacctcctctagtagtgattagttctttcatatttggttgtcttgatttttcatatttaggattagtaattagtttgagccaactttgaggtatcactatttccaactttttgtatcggttttaccatcttgaaacatgaagcttatggaagcttcatgtcctgcttctacggaaagttggtatgactattatgcattgcttctactgaaggttatgcacccttgcatttgcacttgagttaaaatatgttcctatggctattatgcatatactatgcataccagttatccagcttatggacgctccatgcttacttccttttgcttctcagatttattagtctttgcttatttccctgaaagtttgtcttgttccatttagctcgcttggacatttgaaagacaaggtaccaagttggaatggcggtggaagctgcagccttcaccaaacacgcagcagactatatctgagatcctggattttcttatggatgcaaatatacgcttaagtgtatgtccctttgcttcacctcttcactttttcagcctacctgtgattctgaaacaggtttgccaatcgctaagctctgcttatgttgatgaccaagggatgaattggttcttgaggcgcagatgaatataaacttgatttccctgaattattcctaccaaagctactgaaccacttcagcacgtttcttacttggccctaaatttacggaattctctatattttcctcactttaggaagaggttgtgaggaaaacacaatcctttgacaagttgaaacaagaagctgagaagtgcttgcaacaaagtgaaagatttaacaatgagaaagctgagttcgaacaagccgccttttcaaaggtaccggtttcttatgctactgtgtccactcagtgaatattgcaggtgatactttcttatgctgctccatacgaaatccagcataccgatgtgtatacatgccctcggcttctttgcattgatgtacactgctattacttaaaacgctggttgctgggtcttgcctttttttgttccctttcctgttgatgtctagatgccaattcttatatcatttggctgtaattttgatcttagtttatctatgcgttactcaccacttgtgtgttcctctagtttgtggccgtgttgaattcgaagaaggccaagctcagacaactcagagataaagttgtggagctcgaacccgctgtcaagcctccaaaggaggaggcaggtcaggagcaggaggaggaggaggagaactcaacggaccggacagagctcttcgagggagagaatgacaaagaagcaagcgccaaggatgaacactccggcgagacaggcagcggcaacgttcctagttctcctggggaatcggcagctacctccagaggaagaggacgagggagaggtcgtaagaaggcaagaagataggctgcctagactgacaatagcaggtcctactcggaaattcgctaatcgtcgtggtgcgtctttagccggctagtctcatttccaagagcacgtgtctttcatgtacctttgtgttcgcgtgctgttggcaggcagagtattgcctgtgaaactgattgtccgtctgcttcgtctcatcagtggaaaatattttccatttcatc

SEQ ID NO: 69 - protein, 290 aa, Zea mays
MAAASSAAPARHSCAKLSVPVEDPKAVTAGGGTVFVKATWLPSRFSLAVTDGAGAWVADASDHEVRLRAEQWDQPVADYIALAERYLAFQQPGSTYSFHDAGKGQRRLAWTFERQGTKLEWRWKLQPSPNTQQTISEILDFLMDANIRLSEEVVRKTQSFDKLKQEAEKCLQQSERFNNEKAEFEQAAFSKFVAVLNSKKAKLRQLRDKVVELESAVKPPKEEAGQEQEQEQENSTDRTELFEAESDKEASAKDEHSSETGSGNVPTSPGESAATSRGRGRGRGRKKARR

SEQ ID NO: 70 - DNA, 6862 bp, Arabidopsis thaliana
ccaaaaccggccgtgcaacttttcaaacgcgacttccttctccggcaagcaattcacgccgctgctcagtgattctccgtcactatttccctgattaaccatcttctccggaagaatctataattccggcaaagtaagatgacggaggagatcaaattcagcgtactggtatctctctttaactggattcaaaaaagcaaaacctcatctcagaaacgatccaaattccgcaagtttctcgacacttactgcaaaccctccgactacttcgtcgccgtccgtttaatcattccgtcgcttgatcgagaacgaggtagctacggccttaaagagtcagtgctcgccacgtgtctgatcgacgcacttggtatctcgcgtgatgctcctgatgctgttcgtcttctcaattggcgtaaaggaggaactgctaaagctggagccaatgctggaaacttctccttaattgctgctgaggttttaggatttgtttgactttctttctgggttttggtttttgggggatttagggtttttgaacagttttgtgctcataggtattgcaacgtagacaaggaatggcttctggcggtttgactattaaggaattgaatgatttgcttgatcgtttggcttcaagtgagaacaggtgcttctctaatcataaagaatcaattttgtttctgtttactctcttatcttgttttcttttgggatctagagcggagaaaactttggttctttctacattgattcagaagacaaatgctcaggagatgaagtgggtcattaggattattctaaaaggtaggaactttgcagtttcttcacataaagtttccatcttttttctttaaagttattgagatcaatctgattttgttgggaaatggtttacagatttgaaactgggaatgagtgagaagagcatttttcaggagttccatccagatgctgaggacttgtttaatgtcacatgtgatttgaaactagtctgtgaaaagttgagggatcgacaccaacggcacaagcgccaggttttgtatttagaaattcttgaatgacaacttacaaactactgtttcatttcctcgagatacaatcgatttattgaaatcatcttaaactgataagcataaaaactgtgcttctcttgtaggatatagaggttggaaaagccgtacgaccccagttagctatgcgtattggtgacgtaaatgctgcttggaagaaggtaaattccatcaactctattgtcagcttactccatttccatgtgcagtattttgtttgtttgttaatgttgttgtattggtgttttatttcattaaccaatgcatgagtctcttcctcgacacagctgcatgggaaagatgtagttgctgaatgcaaatttgatggggatcgcatacaaatacacaaaaatgggactgacatacattacttctctaggtgagtcatatcttcgtctaccctgctataaatgttttgataaaagatcttatttgcatatggcaacgttcatgactatattgtgacttggtgtccggaatacccttttttggtcaaatactgtaggtgtttcaagttctctagaaatttgatagatagggaatttgcacttacttttgttagtgatggtgcaggaacttccttgaccattctgaatacgcacatgccatgtcggatcttattgtacaaaatatattggtggacaagtaagaatccagttgctgctcttttttaggctctggaaggttttagaagcttggaattatgagatatacaatctttcattttctttttgtttgccatataggtgtatccttgatggtgaaatgttggtctgggatacatctctgaatcggtttgctgagtttggttcgaatcaggaaataggtttggcgtctaatcaatatccttatgttgaaaagcttagtcttgcttccagtagatttgattcttgtactcttgttcacagccaaggcagcaagggagggtcttgacagccataaacaggttcatatgcgaagtcccacctgtttacttttgttgtttgaggatccgactacaaactctgatgttcttttatctgctaatgcagttgtgttgtatccttacgaggagaagttaatgcccacacttaagaattccctgacaaaacgactttagaaatattattttccttgaccctgtactagatgttgcctttgatgttctttatgttggcgatactagcgtcatccaccagagtttgaaggaacggcatgaactgctgaagaaagtggtcaaacctttaaaaggtcggctcgaagttttagtacctgaaggtggtctcaatgttcaccgcccttcaggtaaggactactaagattctagttgactgtgcgaggttcacaagtgcgacagagttaaatcaatggatacgtgaacaatccttttgcaggggaacctagttggtctattgttgttcatgctgctgctgatgttgagcgatttttcaaagaaacagttgaaaacaggtttctttttaattcttaatgcagccaaagtttctctatccactattcatgatttgtgcaaaacgtttggatggtgccttcttggcctcgtgtgaacagtgatacttgcttgacagaatctaacctctagtacagagacattatatggttttcttcacagatgcgcgttcttatttccaatccttcttctttgtcctcagagatgaaggaattgtgcttaaagacctggaatcaaaatgggaacctggagatcgtagtggcaagtggatgaaattgaagcctgaatatatccgggctggtgctgacctggatgttcttataataggtctgtacttaatattatgtttacttttacttgtttaaagatgaaggtcatttccattggatcttattgggaattttacatctttgccaggaggatactatggctccggacgtcgtggaggagaggtagcacagtttcttgtagccttggctgaccgggcagaggcaaatgtatatcccaggcggtaagtatttatatggtttcacatttctcgtataagatgaaatcagattgtcagtagaaacagccatgagagaacatgcgccatgaagaccttagggcttttcatgttatcggaattgttagttgtttgcctagacattccaaatctaattatcaatgataagctattctcttttttgcagatttatgtccttttgtagagttggcactgggctttctgatgatgagcttaacactgttgtaagcaaactgaagccttatttcaggtgaaagacgtaatcatttacttgctttctcatctcattaaaacaaaagaaatataaaataatatgtttttgtggtatgatattctaagaatgagaacactgcctcttttttcattttacttgtctttcagaaaaaatgagcacccaaagaaggctccaccaagcttctatcaggtcactaatcactccaaagagagaccggatgtttggattgacagcccggaaaagtcagttttctgtcaattacctccttttgctcatctgaagcagaagaattgggatcactgaatactattattcgcgctcatatcttttctcttcctttttttgcagatcaataatactttcaatcactagtgatatcaggacgataaggtctgaggtatgtctataagatgtgatgtgaagattagccagttaactcttacatttcttaatttaattcttgcaatgcagatttgtcgcttaaaatgcatatgctctattttatgtaaaactctgctcttttcaggtgtttgttgcaccttacagtctgaggtttcctcgtattgataaagtaagatatgacaagccttggcatgaatgtcttgatgtgcagggtgagtaaaagaactaaagaaattctccaatgttcccattttcatgaaagttgaaataaccgatttgctttcactttatatgtccgactgatgttgactttgcagcttttgtggaattggtgaattcgagtaacggcaccacacagaaacagaaggagtctgaaagcacacaggacaatccgaaagtcaataaatcctccaagagaggagagaaaaagaatgtctctcttgttccctctcagtttattcaaactgatgtatcggatatcaagggcaagacctcaatcttctcaaatatgatattttgtatccttgacatgttttaaaatgagttttcttctctctgtttcattatcacatgggtaccgttttcttactgattgcatcttcagctgtctttctctattagaattagacaccttttcacatggataagtttctgaaattgctttaacttacaaactttgatatctttgtcatactatattgttctttaccaccttgacaaatctaacagattttgttaacgtgcctcggtcccattctcttgagacattccacaaaatggtggttgaaaacggagggaagttttcaatgaacttaaacaactcagtgactcattgcattgcagcagaaagcagtggtacgtactttcttaccattacatattgatttttccccaacccttttgtacacatgagtgagtctcaaaacaattttaataatacgagcatgacaatgagatactatttcaggaataaagtatcaggcagcaaagcgtcagcgagatgtcatccacttttcatgggtcttagattgttgttcacgaaataagatgcttcctttgctgccaaagtgagtcctatcaactttttcttatggtattcaaccctttagggtttcttttgcttgtcgtgtctaactaaaaagcttttgcggccacttttgaaggtacttcctccacctcactgatgcttcaaggacaaaattacaggatgatattgatgaattttctgattcttattactgggatttagaccttgaaggtctcaaacaggtatgtattgtattccttattgagaccattcagtgagatcatacaatcgatttgcaatccctttcgcttcatttccaggtcttaagcaatgccaagcaatctgaagattcaaaatctattgactactacaagaaaaagttatgtcctgaaaaaagatggtcctgcctcttaagctgctgtgtttacttttacccgtatagtcaaacattgtaaggcccctcttgtttctttcttatgttgtttaaccatgtcagttacctaaagcaatactcatcatcctcaatgtgtctttttaacatgaaggagcactgaagaggaagccctattgggaattatggctaagagattaatgcttgaagtcttaatggctggtggtaaagttagcaataatcttgctcatgcgtcgcaccttgtagttcttgctatggcagaagaacctttggattttactttagtttcgaaaaggtattccaaattttgtctgtttctgctattgagtttagcaccacattataatgagaattaagactctatttatttggtctctcttcaatagtttcagcgaaatggagaaacgtcttttgctgaagaaaaggcttcatgttgttagctcgcactggttagaggaaagcttgcaaagagaggaaaaactgtgcgaggatgtctacactctgaggcctaagtatatggaagagtctgatactgaagaatcagagtgagtcaccacttttttatgagtccgtatctacaaatgatatgaaatttagtctctcatctatttaagggcgtgctaatataaaaagtttccaatgattatttatatctgtttgcttcagtaaatccgaacatgatacaacggaagtagcttcccaaggtagtgctcaaaccaaagagccagcttcctctaaaattgcaattacgagttcaagaggacggtcaaatactcgagctgttaaaaggggaaggtcttctacaaactcactgcaacgagtacagagacgcagaggcaagcagccgtctaagataagcggagatgaaacagaggaaagtgatgcttctgaagaaaaggtttcaacaagactcagtgatatagcagaagagacggattcgtttggtgaggctcaaagaaactctagcagaggaaaatgtgcgaagagaggaaagtctcgtgtgggacaaacccaaagagtacagagatcacgcagaggcaagaaagctgcgaagataggaggagatgagtctgatgaaaatgatgaattagatggcaataacaatgtgtcagcagatgcggaagagggtaatgcagctggtagatctgtggaaaacgaagaaacccgagagcctgacatagcgaagtacacagaatcacagcaaagagacaacacagtagcagttgaagaggccttacaagattctagaaatgcaaagacggagatggatatgaaagagaagttacaaatccatgaggatccactacaagctatgttaatgaaaatgttccctattcccagtcaaaaaaccacagagacatcaaaccgaaccactggggaatatagaaaggctaatgtttctggtgaatgtgagtcttcagagaaaagaaaactcgacgctgagactgataatacatctgtgaacgcaggcgcagaatcagacgtagttcctcctctagtgaagaaaaagaaagtcagctaccgggatgttgccggagaactgctcaaagactggtgatactctaccatttcgaaccatgtaacaaagctcttatgttatgtacatgttttgtaactcttaaatccttttttatctcttttggtgtggccataatttatttattttactggtaaacaaggcgtacatttattgtagacagtagagaaaaggtgaaagaagaaaggcttcgtgatggacaaaca

SEQ ID NO: 71 - protein, 1219 aa, Arabidopsis thaliana
MTEEIKFSVLVSLFNWIQKSKTSSQKRSKFRKFLDTYCKPSDYFVAVRLIIPSLDRERGSYGLKESVLATCLIDALGISRDAPDAVRLLNWRKGGTAKAGANAGNFSLIAAEVLQRRQGMASGGLTIKELNDLLDRLASSENRAEKTLVLSTLIQKTNAQEMKWVIRIILKDLKLGMSEKSIFQEFHPDAEDLFNVTCDLKLVCEKLRDRHQRHKRQDIEVGKAVRPQLAMRIGDVNAAWKKLHGKDVVAECKFDGDRIQIHKNGTDIHYFSRNFLDHSEYAHAMSDLIVQNILVDKCILDGEMLVWDTSLNRFAEFGSNQEIAKAAREGLDSHKQLCYVAFDVLYVGDTSVIHQSLKERHELLKKVVKPLKGRLEVLVPEGGLNVHRPSGEPSWSIVVHAAADVERFFKETVENRDEGIVLKDLESKWEPGDRSGKWMKLKPEYIRAGADLDVLIIGGYYGSGRRGGEVAQFLVALADRAEANVYPRRFMSFCRVGTGLSDDELNTVVSKLKPYFRKNEHPKKAPPSFYQVTNHSKERPDVWIDSPEKSIILSITSDIRTIRSEVFVAPYSLRFPRIDKVRYDKPWHECLDVQAFVELVNSSNGTTQKQKESESTQDNPKVNKSSKRGEKKNVSLVPSQFIQTDVSDIKGKTSIFSNMIFYFVNVPRSHSLETFHKMVVENGGKFSMNLNNSVTHCIAAESSGIKYQAAKRQRDVIHFSWVLDCCSRNKMLPLLPKYFLHLTDASRTKLQDDIDEFSDSYYWDLDLEGLKQVLSNAKQSEDSKSIDYYKKKLCPEKRWSCLLSCCVYFYPYSQTLSTEEEALLGIMAKRLMLEVLMAGGKVSNNLAHASHLVVLAMAEEPLDFTLVSKSFSEMEKRLLLKKRLHVVSSHWLEESLQREEKLCEDVYTLRPKYMEESDTEESDKSEHDTTEVASQGSAQTKEPASSKIAITSSRGRSNTRAVKRGRSSTNSLQRVQRRRGKQPSKISGDETEESDASEEKVSTRLSDIAEETDSFGEAQRNSSRGKCAKRGKSRVGQTQRVQRSRRGKKAAKIGGDESDENDELDGNNNVSADAEEGNAAGRSVENEETREPDIAKYTESQQRDNTVAVEEALQDSRNAKTEMDMKEKLQIHEDPLQAMLMKMFPIPSQKTTETSNRTTGEYRKANVSGECESSEKRKLDAETDNTSVNAGAESDVVPPLVKKKKVSYRDVAGELLKDW

SEQ ID NO: 72 - protein, 885 aa, Arabidopsis thaliana
MQLCYVAFDVLYVGDTSVIHQSLKERHELLKKVVKPLKGRLEVLVPEGGLNVHRPSGEPSWSIVVHAAADVERFFKETVENRDEGIVLKDLESKWEPGDRSGKWMKLKPEYIRAGADLDVLIIGGYYGSGRRGGEVAQFLVALADRAEANVYPRRFMSFCRVGTGLSDDELNTVVSKLKPYFRKNEHPKKAPPSFYQVTNHSKERPDVWIDSPEKSIILSITSDIRTIRSEVFVAPYSLRFPRIDKVRYDKPWHECLDVQAFVELVNSSNGTTQKQKESESTQDNPKVNKSSKRGEKKNVSLVPSQFIQTDVSDIKGKTSIFSNMIFYFVNVPRSHSLETFHKMVVENGGKFSMNLNNSVTHCIAAESSGIKYQAAKRQRDVIHFSWVLDCCSRNKMLPLLPKYFLHLTDASRTKLQDDIDEFSDSYYWDLDLEGLKQVLSNAKQSEDSKSIDYYKKKLCPEKRWSCLLSCCVYFYPYSQTLSTEEEALLGIMAKRLMLEVLMAGGKVSNNLAHASHLVVLAMAEEPLDFTLVSKSFSEMEKRLLLKKRLHVVSSHWLEESLQREEKLCEDVYTLRPKYMEESDTEESDKSEHDTTEVASQGSAQTKEPASSKIAITSSRGRSNTRAVKRGRSSTNSLQRVQRRRGKQPSKISGDETEESDASEEKVSTRLSDIAEETDSFGEAQRNSSRGKCAKRGKSRVGQTQRVQRSRRGKKAAKIGGDESDENDELDGNNNVSADAEEGNAAGRSVENEETREPDIAKYTESQQRDNTVAVEEALQDSRNAKTEMDMKEKLQIHEDPLQAMLMKMFPIPSQKTTETSNRTTGEYRKANVSGECESSEKRKLDAETDNTSVNAGAESDVVPPLVKKKKVSYRDVAGELLKDW

SEQ ID NO: 73 - DNA, 22737 bp, Zea mays
atggcggcgaaggtgcggttcggcctactggtggcgatgttccaggccatgtcgggcgacaagagttcggcgaagaagcgcggccgcctgcgcgcgttcctcgaccgcgcctacgtgccctgtggcggtagggatgactacttcagcgcgctccgcctcgtgctgccggggctcgaccgtgagcgcggctcctacggtctcaaggaggcggccctcgccgccgtgcttgtggacgcccttggcatcgccaaggactctaccgacgccgtccggctcaccaactggcgccgcggtgggggtggccgcaacgccggcaacttttcgcttgtggccgctgaggtattttatgctggcagttcttcaatagcacttgcaagtcctcaacctcacattctctgcagttaactaattatgccttgctatctcgcccttgtcagacaacagtatgaaatttgttcagttgctaatgtgaacctgcgagcatttgtttagcttagttttaggttggtttcaacgtagtaagtgtgtgaattcggaaagcagcataagctctagccactgagtattagttcagttgctacatgtccataggttcatgctcagcgagtcagcctttatcattgacattgtgtcaagaaatcttcgtatttggtgcacaccatgtgccaataatcctccctgcttaaaaattccgaagctgtcttgatctttatttggttttacatgattgcatgagtttaatatgtagttgaaaagtttggttcagttcagaatgattatatgtagattgcttgattagtgtgccatcttagttgttgtggttcgtcagcaactacttacctaagttatatattgattgccacctagatcttgcaacggaggcaaggtataacttctggcggattgacgataaaggaggtcaatgatgcacttgatcgtctagctacaactgagaacaggtagctgcagcagctatttgaatttgtctatgatagaactgtcaggagttccttttcatcttgataggtctgagaaggctttaatactttccaatctgatcaagaaaaccaatgcccttgaaatgaagtggcttctgatgataattcttaaaggtgtgatacgtgtgcccatttcttatttggtgtgctcttttatgctttgctgcaattgcagtgtttttatttgcttttgttttttggcatattttgctgtagatttgaaattagggataagcgagaagagcatattcgaagaatttcatcctgatgcgcaagacttgttcaatgtcacttgtgacttgaaatttgtctgtgagaagctcaatgatcgaagccaaaggcataaacgccaggtgaaggctttaagctctttttaaatgaacttttgcttatcataacttgtctcttcatgtgcaacattgtacaacaacaacaaagccctttatcccaagcaagctggagtaagctagagttaaaaatccaatagaacccacagtcaaggttcacgaacatgaatagctattttccatgcactcttattcaaggctaaatctttgggtacatcccattctttcaagtctccttttactgtttctttccatgtcaacttcgactttcctcttctcttctcattgtcatcgtgccttaggatcttactacacactggcgtctctggagatctctgttggatatgtccaaaccatctgaaccgatgttgagcaaacttttcttcaattagtgctacccctagcctatcacatatatcatcattccagactcgatcccttcttatatgaccacgaatccaacacaacatacatatttttgcaagacttatctactgaacatatcgtctttttgtagaccaatattatgcaccatacaacgtagcaggtttaatcgctggcctataaaatttgccttttagcttctatggcaccatatagtcatatagaacgtcagatgctcgacaccacttcacccaccctgcttttattctctggctaacattttcatcgagaaatttgctattttgccgctctcaattttggctgcctgttattatgccatctcgtgtctatgactggtgggaccgtctgtgtctatgatttgtgggtccgatggcatactggcgaagcccacaaatgataatggcaaaattgccaatggctccattttcatcatatccccgtcactttgtagcattgatagtgtttggttcgggagcgaggtggaaaggaggttgagggatgcctggaacagagcggctccaaaaagagaatatccctctagtatgctgaatctcaccgctccccaaaaactatcgaaccttttggctcgcgggacggattggagtcattctatcttctaaatacggaatggagtcattccattcttagaaactgaaacggagccgttccattccaccagtctctagaaccaaacacaacctaaaggtatccttcctaggcactacttgaccttttaaagtaacatctcctttctcacatgtagtgccaaataacacatttcatatattttgttttagttctactatgtctaaaacctttggattctagagtctcccgccacaactcttgttttctatgttgtagcccctttttttttctcgatcgacgcaggagagctgcgtgtcatttcattaagaaagaaagataacagtcccctcaccaccccaacactgttgccaaaacccttttctcacccattgttttgttgtttttttgcttggggcggacatttgcatttatatagacatgcaccactcatagagaacacggtggtttcataaggctgactccagcgggtgcctgtaaaccggcctgtagcctatatttagagaagattctgtcttctatacactccaacagtgtcctctaaatataaatgacgctcctccatcctctctatgtagagactctctctcctcacctttatccatttttatacttcagacaactgattaagcaaaactaaaatatgtataaaatatttgagagtgtgacaaatacttatgtacaaaaatctagagcaaaatctatccctaaggctgtctccagcagcttacccatcccatctcctatttcaaacttcaatctgtgcaatgcagtgtacaatgtaaaataatgttttacacgactatatgcacggtctgctggagacaacctaatatgtgtatttaacgcatagaggacaagatatagagggcgctattggagaggaatgatatatagaggagatgatcttttagtgctcgtaaaggagggatatagaggatatggttgaagatagtctaacattttctgatgacccttgttaaagggcgtctcgtgtctctacagttttgaggaccctgggacgaacacgacactatggaccctatagtttcatgttttttcctctgtaacatggtaaagcctatataggtctaatatatggactgatgacccctctctgtcatgggccctagccccagagccgaccctgccatgtattacactctattgcagctgtggtactcatagatatgatttatttatttatttattttagggattttgtgtttatccctttatgctgtttgatcaggatatagaaattgggaaggctgtcaggcctcagctagctttgagagttcgtgattcttcagttgcttggaagaaggtgcctgcctccacccaccagtttccttctaaatatatagtcattgttaagtgaaaggctgctttacacttgttctacattgcttggatttgcttggtcatcacacccttctccttttccagcttcatggaaaacaagtagttgctgagtgcaaatttgatggtgaccgtattcaaatccacaaaaatggggaagagattcatttcttctctaggtaactgaattggttgctaatacatatttacttcttgcatactcttgaactactggtttcttttctgtttgtctatcttttttatttgcaatattgttcatcctttcagatagcttctgtttgcttcactaactttatatttgtatatcaggagctttcttgatcacactgaatacgcacctgggatgtcaaagattattaaagaaaatatcttggttgacaggtaaactttaatttttttggcaaaaaaacacataaagagtgtttgtacttctagtgccagttttcttcttttctatgaacaactatggcttatgcattttaagacttaagatttggttctgagttcccatggaagaatatctatagtagcactatcttgtttgtcaaaggcaacttgaacaaaaggaatgtatattgtatttacttcaatattaaagattaggcatgatctcctctataggtgtagttagctatgttggaaaccctaaatccctgtacaaggtcagtgttgtatatatattgagttaaatacattggctaggctcaggcctattacaacgtaaacacataatctaacacccctcgcagttgtaattctagccactatagatgttgagactggtccgaaacaacgagaacaccgtcgaggggaggcccttagtgaagatatcggtgaactgggaggtggtcgggatgcggaggacgggaacgttgtcgaccgcgacacactcgtggacaaagtggaggtcaatctccatgtgcttcgtgcgttgatgctgcatgggattggtcatgaggtgtgactgcactgatgttgtcgcagtagacgagtgtggcacgggcaagagggctatgaagcttcggaagcagctaacgctgttggccacgacacgttacttgacctcaacgctggagcgggagacgatggttgccgctctgaggactatgagactaggttgacgcccaggaacatggcgtagtccgaggtggatcgacccgtgttgggacaagtggacaacttgctagatcggcgttggtgtagacaactagctcggatgctagagagggccgaaggagaaggccatggtcgagggtgtcgcggaggcagcaaaggatccgcttcgaagctgtgaggtgtggctctcgcgggatgtgcatgtggaggcacaaatgctggatgacgtatgcgatgtcgggtctagtgaaggtgaggtattggagcgccccgccgaggcttcggtaggtcgtctcgtcacctaccgaggtgccgccgtcgtcggagacctttgcctgggtgttgacaggcgtggagcaaggctttttcgggtaacccgaattttcttttacccgaagtacttgacccgattttttcaggtaactcgaatgcccagacctagttctagccaccaccccacagggacagagtgggcgaggcgggggtccccgggagcggaaggagggatggcagctgcgattggtgctgatggggctgccgtagtgggtggcaagcagagccagctgggtgggtgtgtcgaggaggcacccacagctaggcccaaccacatagagatggtctcagcccacgggttatagaaggacgaccacgcagaaccccctcttctaggaggggcaccaccatgaaggccactgcccccacgaccgaccaccacaggagcaagtagcttgacgaagagccctaggaacaggagtgggggtaggagggtgcggagcccccccggtgagggagggcaaggggactggtcgccgaggatgcgctatagagggtcgtggtagactcggcgcccaaagtgaactcctcgagaaacagctcgttgcggacattgtggaaggacgggaagggcacatcgcgcttgatgagggccttcaggttatcgtagcgtcgattgagaccacacagatggttgaggacaagagtgctggagacgggctcatagagatcccgaagagagttcactatgcccttcattcggcgatagtgcttagtgatagagaggtcaccctgggagaagagccggaaggaggcatcaaggtggagggtgtgggcctcccggttgccaaggaactgggcctcgagtagggatgaaaacggtcggaaacagtatttattcggtaatcagtttttcctttaattgcgaataaataggatatagaatatacaatacaaatttgtattcttgtttttaacatccagcttgttaagattcataaaaggtaaacctcgaattcatcctacattttctcaaataatagatataaacttcggtatggattcggaaacaaattcggtaattttttcaactttttgtgttgtagggagcaaataatacataaaacaacttatataatattttattcatatttgtactaatgtgcttgataacataagaaaagatcaacatcaaattttatacatatttattttaaaatattaaatttgttctaacagttcggattaccactttcatccctagcctcgaggcaacctaggcctgatgagtgatgtatctgcttgcggacgacgttctagagtttgatggtgaggttatcgaggagccacgagagtaccacgctgtccatccgacgccaggatgggagcaggtgggaaacaacgtcagcaatgatgtggccgtcaacgacgtagcagtgaagggtgaggtgcagtgaggggacgcaccgttgaggacgacgtagacgagcgaccaaatgttctggacacctatcgccttagcgtggaggttagcgatgaccgcgacctcatacttcgaggggggagggaccaacggggcatcggaagaggcgagccgagtaggtgatgtttagcatcgactagcttcaaggcgagggcatccaacacgttgtgctcctgctcccagcgaggaccgcatcacgttcgtggtcctaggcagcagccgcgacgaccttagtagcggtgagtgtcgtggccaaggtggactgagcagcggcgatgtctgaggagggaaaggacgtcagagcaggttgggaccatgcgactgcagtagatggtggggcgaaggagctggtcgcgttcagggagggggcggcgccgacaggcaagaggccggcggccgcaccagaggcaggtgctggcggggtggaagtggaggcgacctggccccctgcgtgcgtgttggcacttggcagcaggggcagacgcgtgcgtggtgggctggagccagggagggcatgggcgggcgtgacctaggtgccgttggacgcgcccggggcaaccttcgttgcgacgttgcccatctccgggagagtgtggggggggagggagggaggctggcgggttgctccatggccggtgatggtggcccgagggtggtgggagggagagggaggaaagaaagaggcttgataccatgttggaaaacctaaccctaaaacaagatggctgttgtatatatattgagttaaatatatgggctgggcaaggtacattacaacagtaaacacataatctaacaagctagttattgatgagcttgaggtattaacttgttatgagcctatagaagtaatactgtaatttttttcgatattgcaatctggccttttagacaatataagcttcgttttggatatctgttggacctttttgttttcttttcattttgcaaacttccttgaagctcactctagttctgatgctaattggtactgataatgcagatgtatattggacggagaaatgcttgtctgggacactgtacttaaccgttttgctgaatttggctcaaaccaggaaataggtttttggatattccattgaaaatcagaaagttttatttctccaggatatttttatagtggattaatgttactatttttgcagctaaggctgcaagagagggattggagactgatcgacaggttgttttcacaaaactttttttccgtgtttcagagcgatccttctataaaatttcctatctaacttaatttactctgtgcctgcagttgtgttgtatcctttattttctttactacctgcattcttactttttgtcttgatattcttcactattccttttttttaagtaagacccttagctgcatgtttggcaacaagatatacatttgttttaatttccgttaaccttttttttgtttttggatctgtttcctagcatatgtcggcctaggtttaatgtttgctctcaaatttccagatgttttatatttttttgtttgtcatgttttacttgacactagcgatgcatagatgttgtttttgacatcctttatgctggagacaccagtgttatccaccaaagtttgacggagcggcatcaaattctgcagaaggttgtgaaacagttaaagggtcatcttgagattttgatcccaagacgtggtttaaatgtccctcgcccttcaggtagctgatgactattttacaattgtatttttattttctcatggatgcatttgggttcacccacgtccaaatagatgacattgtacaatggattccggtagcttgatctagaatgctgataggatttcttttgctgcattttaaattttgttcagaagatcacctgttatgttctattatatatctgttgtaaacctattactatgcaatactaagggtctgcttggatgtagatattgaagatgttccaaatctgtctagtattagaaatggattgcaaaatctgttgtttagatgtaactggaattgcaatttcagccaacacagagggtctaggctctgaattgtgagagacaacttctagttatagtccaatactgagaaattgaggtttaaacccaaatctgaattcattagactaacaaacagcagaattcaagaatcctgattccaattcccaattccagacttcaatatctacacccaaccggggtgtaaacttatttacaatatgcagatgaaccatgctggtcgattattgcacataatgctgaagacgttgataaattcttcaaagagactatcgagaacaggtttctttgtaccttcttagttaatcgaacccatttagtgtcaattttatgattttcaattcattaattgtggttagagatgagggcattgtactgaaggaccttgattccaaatgggaacctggtgatcgaaatggaaagtggcttaaactaaagcctgattatatacacgcgggtgccgatctggatgttattattataggtaagcatctttcttcatgtgtgaagagcaaatgattgaccttttgaaactattgattgagggtatgttggcccctttgttgtcagggggatactatggatcaggacgtcaaggtggagaggtgcactagacttggcttactgttttaatttcagcattagggttatctgggtgtgaatgttataatgtcttgctagtgcattgtcttctactgttcctatataatcatcaaaggacatagaaatacattttgtttaatgtcaaaaacgcactcttagctttattcttttgaagctattaaaaagtaaaaactgctgatcattgttcttaactgatttataggtcgcacagtttttagttggccttgcagtcccttcagatgataatagttatcccaaaaggtaagcagagtttctccaccactgtatgtttcatagaagcaattgtaggtgaagatcataatgaaaagcaaattgtgatcatccttaaaactcgaccatgggaagaagatgctccttggctttgcattaaagatccttggttatagccttgttggccgtcctctcaagtctcagcttgaggctctaccaactgagttattgcttggttcttagatgtggttgcctaatatagcgaagagcagtatcgcgcccattcgttgcacacatgatgatttgaatttggtccagcagctccttccctgcagatttgaaacttttccaattaaatacttgggcctccctctctccctgaagttgtctaaggctcaacttcagcctctcattgacaaggtggctgacctcttatcggcttggaaagctgacccgatgacccgtgctggcagagctacccaggtgcaatttgtgctcactgctactgttatctatcatatgatggtactggatctgcctaagtgggttattaaagtcattgataaaatccgtcgcgggttcttgtggagagggcgtaaagaggctaatggtggccattgtatggtggcctggggcaaggtaacacgccccaaagagttggggggccttggtatctctgacattcaatgtgtaaatagggccttacgtgctagatagatttggctccaaaaaatcgattcttccaaaccttggactgacttgcctttccaatcaaatcggtttttggataacttgtgctctttggcaatggcctccatggtgggtgatgggcagtccactcttttttggcaatgacagatggctcttgggtcagaggattgcagacttgacccctcatgtttttagtttggttcctaaaaggctggtgaagagaaggacattggctgatgctctgtgtagttcttcatggattggggatttaaggggagtggtaacgtgggaggtaattgctgacttcattattctggcagatgctgtggctgatgttgatcttcaaccgggagttccagataaacattattggaggttctcttccaatggtatctattcggccaaatctgcttatgagataatgttctgcggctctatctccctggcgggctttgaaagagtgtggagcacctgggcgccgcctaagtgtcagtttttcctctggttggtcttacataacaaatgttggacgactgaccggctcactaagaagggtcttccccatcctagtacttgccccttatgtgaccaggtaggaaggggagtctattcatcacttgcttgtttcctgtcttctcgcgaggcaattttggtttctccttctccaacgtgtcggcctggccgccctttccccggggatggaagatataagttttgaagcttggtggagtagatcggctgaggttgttcctaaggacctcagagatggctttaactccttggtggtcctggggcttggagtatctggagacatcgaaatgattgtgttttcaatggtgctcaaccttctatagctatattgcttacctaagtcggtgatgagttcgatatgtggtgttttgcgggggccaaaggcttgacccgtctttcagacctagcttttgtgttcaaccccggctaggaggcggttttacctcttgttgtttgtgtgtgcgtgtgtgagtggtgtgttaagtccttgtatatactgttttttcttttcttcttctaatgaaatgatacgcaactctcctgcgtgttcgagaaaaaggaaggttttgtactttggtgagttgctgataggtttgcatggataccttttttgtgtctttaagtattatatattctaatactagtatatgcatttcatacctgtgcttggcaaaacatagaaaacaattgcccattttatttattgatgtgatgtttcttgttatcaaacatgtctaatgaggttttatatggtaagaactttgttttgtcatttcatggtgtttcctttttcccacaacagagcccaaattttcttactaaggcaatacagcatcatggtttaaccatctaactctgatgtttcttgttttctgtccttgcgtacactttccaaggttcctttcgttttgccgagttggtactggcctctctgatgaagagcgtgatgctcttgtcaccaaactgaacccttatttcaggtattcaactttgattattatgtttcatatttactgaatcagtattttgtgtaagtacgtttccttgaagcttcaaaacctatttattactaaggaattaaagttccttctcattctgtcatattgtgctattttttgaatcaggaaaaatgagtaccccaaaaaaccaccaaaattctatgaagttacaaataactcaaaggagagaccagatgtttggattgaaagtcctgataagtaagtttttttttaattctttgattgagagccattttcttagatataggaagcacatgatatgctaaatcactaattgcattttcaggtcagtcataatatctgtaacaagtgacattcgtacaatcaagtctgaggtatttgatttaaagaatcaaatacttatatgttctgcagttctgtctttaaaagcattaattcttggactgatttctcttgtgcagtcagctggtgtattttctcttctaacttacttttaatgttttcaaccttatgcaggtatttgctgctccatactgtttgaggttcccccgtattcagcgagtgagatatgacaagccatggcatgagtgccttgatgtgcagggtaattgtttttcttatacttaatattttgtgtctgtattctttgttcttttagtagcttacaataagctacatccctcgtgatgccctaatctaggttatatctcgaagatgatttctctataacacgctgatcattgcagcatttgtggacattgtgcattcaaataatggtacaatacaaagggtggcagatgataatagcctgaagaatgatgacacaaaacattcaagaacaaacaaaaaagtagagaagtgtgtctcaatcatcccttcacatttcatgaaaactgatgtatcaggtctcaagggagaaaccttgatatttgccaacctgattttctgtatcctttccagtgttattctttgctagctatcatggtttttaaagcggtaaggcggtccaaggcgttggaccaccgcctggacgcctagacggcgcctaggcgacgcctaggcgaggtaggcgggcaaggcgcctaggcgttagaccaccgcccggacgcctaggcgtcgcctaggcgacgccttaagaacagagctagctatacttatttacaagacaaaggccagaaaattgtataaagtaggagtattccttatcttacttagattttgtcaacattccatcatcatataatctcgaatattttcataaactggttgtggaaaatgggggatctttctccatgaatctcaatgactctgttacacactgcatagctgcggagaagaaaggtatttacctttgttttaggagttcctttttctttgataatgggatattgaatacatagtttgaagtatatttgcctgttatattttccaggtatcaaatatcaggcagctttacgacagggaagaatcattcactatgagtggatattagactgttgcaaggaaaaacatcttcttcatttgcatcctaggttggaccccttttacttaaccacatttacctcataacttatttagaaaataattctaatgcaattataattgtacaggtatatactatttattgctgatttcgctaggcacaaatttcctgaagagatcgattcatacgctgactattactactgggacattgaaattgctgacctcaagcaggtacagtactgcactatatccttttatcacttcaaaataaaaataatactttattgtgtaggacaatataacaataattcaaaattgaagatgtatcattgtggggcctgaattagtgtaactaagtaactatgcaatcaaccagttagtagaagttgcatatgatacaacattgaaccataatatgacttgtagtttatttatataagcgagattatattttacgaaaggtcttggcggggcacaactaaccattttaggggcttatagcttatgtggtgatatgattggtcgatttatttttggaacttggtatgcatgtaattagatttgaaccgatggggtttgtgtgttatttcttcttaatgcaatgattcatagctttcctatatatttgagagaaaaatattttgtgaataacctctcacggaatagaactatcgaaatgtggcatatcttctagatacaacaacaacaaagtgttttaatttcaagcaagttgggataggctagagttgaaacccaatagaaactacaagtccaagttcatgcacatggatagatgttttccatgcactcctactcaaggataaatctttatatatattttattctttttctacttttattgtctctttttgtcaacttcgattttttcctgcctctctttccatcactatcgtgtcttaggcatggtttttaaagcggtaaggcggtccaaggcgttggagcaccgcctggacgcctaggcgaggtaggcgggcaaggcgcctaggcgttagaccaccgcccggacgcctaggcgacgccttaacaacagaggtcttagggtcccactacacacttgtgcctttggaggtctccgacatgtctaaaccatctcaaatgatattagacaaacttttatttaattggtactatccctagcctatcccgtatatcattgttttaggctcgcttccttgattctcttcttatatgcccacaaaaccaacataacatacatatgtccacaacatttatctattgtctattaaacatgtcatctttttttggccaatattctacaccatacaacatagcagatctaatcgccgtcctataaaacttgccttttagcttctatgttaccctcttgtcaaatagaatggcagttgtttgacgccactttatccactatgctttgattctatggttaatatcatcaatatcatcgtctctctgtaggattgatcataaatactgaaagttatcctttatgggcattgggcactacttaacctttcaaactagcatcttcttcctcatgtgtagtagtgccaaagtcatatattatatattcaattttagttgagttgaaaacctttggactctggaatctcccgccacaactctagggggtgtttggtttgaagaatcaatctattctagatgaggtggtgcatcatgagtccattccacaaatttggtggaatgaactcatttctcatattattactaattattagcttatgagaaatgaaattgtgatggatcaactcatttcattccacaaaccaaacaagaaagtgacgagtgaaaagatgatggactacctcattcctcaaacgaaacacacttctaattttccatttactcctgctcgactttcattagttaacactacattgctgtaaaaaaacatacaccaagggatatcgccttgtatgtcatttgtgacctcatccatcaacaatgtgaaatggtaaagggctcaacacagtttgagccttgtgagagaatttggcattcttgggctcctctggaaatgtaaatttttcttgtggcttgtggctcttagaagatgctggacaatagatcggctgcaaaagcgggggcttcgacaccctgattgttgccctctttgtgatcaagaacctgaaaatatcgaccatttgatggttggatgagtttttgcaagacaattctggttcaggttacttagacaggtcaatctttagagcctcactcctcagccgggtgaaaggaacaccatggattggtggaggatggctaatgatcaggtgcaaggcattgccgcaaaagggcttaattccttaatcatccaagggttttgaaaactgaagaagatagagagttgtgggagatggccgggaccaagagtttgtccctcctaatggcccctattcctggattgtagccttaggtggtcgctttagtagtttgtttcctatggatgtctatttgtatttttgtttttggccgctgtaaggtggtttttctctctcttatattggtctattttggaccctcctatcttcttaatataacgatgtgcggttctcctgcgcgttcaagggtaaagggctcaaagctggcccttgataatcttattctaaggctggtggcaacgcgggcggtagcgcgggcgagagagagccgctaccgcccgcgcgtgggcgagaggcgggcgagagagggtcgtcgggcgacggcgctcgcgcccggcgagagcgggcggtatcgcctcgctctcgcccgcgctggagcgcccgcccgggcgagaggcgggcgagagggaggcgaggcactggcggggcgagagcgacgtggcgcgatctgactggtccacgtgtcgcgatctgattggtccacgtgtgctagccgttgcaactagccgtttttgaccgtttggagtccaaaaaatcacaaatttcatccccaatccctctatatatatccctacccgggtggagctcattccacacaccatttcatctcatttctctcttccaaactcgccttttctactcatcttcacgtcatgtcttcctcgagcacaaactcaagtgaaggagccgaaggggcaatgtgcaatgcattgcaagcagccatggaggaggctatgctcaacctcaatgaagagtcgtcgagccggcccaagcgtcgtcgacgctacatcaatcgtgatcgtgagtctgcccatgatcggcttcatcaagactacttcgccgatgactgtgtgtatcctccaaattactttcggcgcaggtatcgcatgaggcgacaactttttttgagtattatgctaagattaggtgaatactctccgtatttcacccaaagagaagatgctctgggtcgactcgggctctctcccctacaaaagtgcaccgcagctctgcgcttgttagcctatggatccgctgcagattcgatagatgagtacttaaagctagctagatcaactgcattagagtgtctagagaagttttgtgagggtattcattcattgttatagggaggagttctgtcgtcgatgagtacataataatcattagatttatgtaattttctattaattattatgtatttttaaatcgtcatgtaattttattttaattattacgcaatttgtaatttttaattcaataaaaaatattatgttgtgtgttttctgagcgttgaaataaatccgcgtgaattacttaattctgaaatagaaaagctgatgtggctatagcctgaggctgcagcctgtgcactggagcagcagaggcgagagtggaggcgagagctgacgtggcaggggcgagagggaggctgtgcactggactcagcctaatataaaagtcatctgtgtctccatcacttgttcgaacactagtcataaccttgtttacatgttcttaatgagtccaacatactttgttgggccttaatgtttgtccaaagagttggagaatgagaaaacccccttaaccctaactagggtagggactggtatatattgatagatgttgggcctggcccattatacaagggtgtgacaataattacaaggggctaaccccaaaaccctaggctggtactataacacaaagcccaccaaataatattattattattttttatcataagccttctctaaatcaatgaaaaccatgtctaggtccttcttgtgctctctatactgctccatcacttgttttattaagaaaataacttccatggttgacctttcgtcatagttattaaggtggtaaggcgaccgaccccctttttaacttttaagcggtaaagcgtaaggcgaggcgacaccttattatatagtaactagtcggttgcccgtgcgttgcgacggcttacagcaatacccacgtaaactatcttattgattgtctccgctctctgtataatattttgatttggctaactgatgttattgtttactccatccaatatgttttggtacaacacagccaatgaaatgagcgattagaagagagttcacaacgactgactgaacgaacaaagattatagaatgacataattccaccatacagagaccaaataagagaaaatatgtgagctcaagtttctaaaataagtcacatgaactcaaacttataaaaaatatagatcaaaatatggagtggttgctaaagtcagacatcaataaaaattggatgtgctccatataaattatgctacttcgtagcaattactaacttttaaaaccaacaaatagcctttcattttactgttagtgtgacaaatcattgttgctccatccaattcagcaacctcaaacaccatgtagtctattgcgccaatgtggtctcagaaacgacctaatgcttgcaagagccaagaacgtcgtaccgtgcttggctgtagcctcggcccgtagtgctggcccaacccgacacgattctatttttttgttttacaaaaaacgtatatacatatatacaatctatattcaatattaaaaacatttgagcattatgttctactggttagacagcttcactcagtatctcttgcccttttttccattagggcatgggttcgaacccacctcctgcactgtttttaatattttacgttgatttaatcaaatgggccgctgtggcccacaggcgctcctgtttttttaacattttacactgatttaatcaaataggccgacaggctaacgggccgctgtggcccacgagcgtctggcccgtgccgtgccgccgtttggccatctatatgtggaggtgtgttttgggatgtgggggttggttgcgcggaccggacgaacgtgcagcggattaatttgaaatagctgtgaggggttatttgtaaaaagatgatgcgtgatgaccgttgaaactggtgctttaagtatagtagagatataacaccttaatataaaatattagaccaaatattatttatataacatcgattcaaaattaataagctagcacaactataaggcctagtcgacccatttcaacctagtagaaatgagaaataggaaaaaaaggaaaaaaaatcctactacaaagcccaactaacctagcccaatagtgtagcccaacagttttaggttaaaacctacaatctcggaccaaaactcttcctcctctcctgcgcagccgctagtcgccagtcactgctctctctcccctacaactcctctctcctccctgcaccgcgtagctccttctctgtccctcaccgtagctcctcatttcctgactgaccagctatggcctcgcgccgccgccgccctccacagctcctctctccctaactagtcggctgggaccacgcgtcgccgtcgctgcggcctgtgcgcgtcgtcgcaacgcgctgacattaggtcaatacatccaaggagcgatgccttaactgggttcaaggcgccagagcgacgccttagcagatgaagcggacgccttaggctaatgagtaaggcgacttggacgctttacggctgacctcgccttactgcttaaactatgccttaacaaaattggttcatagaaatctttgttattcgtcttagatgatgctcgattactcgtagcttcatagtatggcggtatggcccatcaacttaattcctcgataattggtacaactttaaatatcttcgttattcttatagattgctaccaatatatttctccttcactcgtcggacatcttgttcaaccgtaagatgtggatgagcaacttgggtagccatactactactatgtccccgagacatctctatgcctcaattgggatactattatggtccattgccttacccttttcatcctttccaatccctcttcaacctcgaatcctacacacgaagcgtctattggtgtcagtgtcatccaactgaaaggttatgtccccattcttctcatttaacaatttgttaaagtactctcgccctctatgtttgatctcatcttccttcaacaagaggtgctcgtttcatccttaatgtacttaacttggttggagtctcttatctttctctcacggaccctaggtatcctatatatgtccttctccatcgtactcaaacgttgataaaaatcctcgtacgtcttaccctttaccacacttacaacttgctttgcggtcttctttggtaccttatacttctctttgttgtccacactcctgtcatggtataacatcatttcttctccttaatagcactttagacttccttgttcctccaccaagtatctttagctttgtatccactcggaccactccctttggttgctccacacacctgtgaggccacctttcgaatgcaagttgccatcttctcacacacgttgtttgcctcatcttcttccttctaagtgcccttttgatggtcttttctttgaggacttttgacgtctcctcttttagtttccaccactttgttctcgtaatcttggcttgtttatcactatgggcacacaaacctaaaaacgaaagaccgccaccacaagcttatgttgagagacaacacactttctaggtatcactttgcaatccaagcatgctcgattgtcctctctttttgtgaggacaatcaatttgactggagtattgaccactactatagtataggtcactaaatgggattctctctttctaaagaaaagtgttggctttcaacaggtcaaaagctatcacaaagtccaagacttcatgtcctaactgattcctactaccatacccaaaatctctatgaaccacctcgaaaccggcatatcttctagatagaaaggacaaaaatcatgtgttccctcagtagaagtgtgatttgcttcccataagagtctccaccaatcctcttttgtttcattgttcgcacaacttttccgaaatatgatcaaatttaggaaaatcagtactaataattgaactagagagatcatagagacccttagagcttgtttgggagcacggggattggaggggattgagggggctaaaatcccctttctattcaaaatttagcaaaggggatattttagccccctcaatcccctccaatccccgtgctcccaaacacgcccttaggggcactcatttgcacctttatccctcgagcatacgtgaaccatataggaataaaggatttgaactcttctaatctcttcctaaatatgatccatccaaaagactgaaactgatcaatgttggatttgcgtggtagcacccaacgacgggttgtcatatgatacttttccacagcctcctgttgtttgcaacttttccctggcatcataagtttgtctttattttgtcacagtggttttttgtacttagaagcatgcgttttgtagaatggcaataaaagagatgttgctattacttgaaatttttacctttgtcaaggatagattcacaatgaaccattttgacatttcctttttttcatgcaccagattttctgtaacattgacaaagtttctggtgattcaaacatggttattcagtacaaaaagaagcattgcatagatgaaagattctgtttcttccagggttgctgtgtctacttgcataatgcgcccttagtgtaagcttcatttactgtcaagtagcatgtctttcacatgatacatctcctcatttgtttttttcaccttttttcctggaggaatgcggactacaatgtaatatctgatcttgcactgaagagggtgaagcaggatctaacaatgcatggtggtcaagtctgcagcagtattgctccagctactcatttggtagtagtttcggttttacaggtctataactttgataacctgtacaagaggtactgagttattgctttagatttgctttgtaacttttgtgagcgaagggcaaatagaaaaactttatggtcgtccattggttgtttatgcagcttccctcccgctgaaagacgttatctacatgacaaaagattacatgttgtcagtaacaagtggttggaagattcagtggagaaacaaatgaagctctctgaaactgcttacagccttaaaccagatacactagaagaactagaaattaaaaggaggtaaccggtgattgcccacataacgacactttcaatattaaaaaaaatgcatatggttgtcaatcttctgtctgtttctaatttgtttcagtgaggaaaatgttcagcctccggagcataagtttgaggaacacaaggaggttgaaagatctcatgcggaaaatatgccaaggaaaaggagtaggccaaccagttcaagaactgcaagggctgctcctagagcagtccgccgaataaggcctagaagaggaaaccagaaagcaaaaataggtgatgttgaatctgaagaaagtggccccagcgaatgccaagatgatgaaaatttggacacagatgatacctctaagattgaagaaggtattaccaacaaaaacaaaggactccctgcacctgcttcaaaaccagcctggagaacaggggctacaaaaggaaatcagcatacaaaaatagatgacagcggatctgaagaaagtgggccttgtgaaacagcgcaagatgattacatctctaagatggaagtagataacattgataatgaccgtggaccaccgccaggtgctcagcttttcacgttgggggagcaagaggtcaaaggtgtcaaattgaacaccgtggaggagaaacaagacagccctttccagagaacaaccgctgctgaagcgatgagtagcacgcctggtgagaagatagaacaaatggctgatccgttgcacgccatgcttctggatatgttgccactcctgggccagaaaaggacagaagatacaagcaaggcgcccttggcgaaagctgagaaggatccacctgcgataggaagctccacatccaattctgagattctgttgccagatgctggaacatccggggttccagccccagagccaagtgcagctccaccaaagaagaaaaaagtgagttacagagatgtcgttagtgaacttctgaaagattggtga

SEQ ID NO: 74 - DNA, 21656 bp, Zea mays
atgaagtggcttctgatgataattcttaaaggtgtgatacgtgtgcccatttcttatttggtgtgctcttttatgctttgctgcaattgcagtgtttttatttgcttttgttttttggcatattttgctgtagatttgaaattagggataagcgagaagagcatattcgaagaatttcatcctgatgcgcaagacttgttcaatgtcacttgtgacttgaaatttgtctgtgagaagctcaatgatcgaagccaaaggcataaacgccaggtgaaggctttaagctctttttaaatgaacttttgcttatcataacttgtctcttcatgtgcaacattgtacaacaacaacaaagccctttatcccaagcaagctggagtaagctagagttaaaaatccaatagaacccacagtcaaggttcacgaacatgaatagctattttccatgcactcttattcaaggctaaatctttgggtacatcccattctttcaagtctccttttactgtttctttccatgtcaacttcgactttcctcttctcttctcattgtcatcgtgccttaggatcttactacacactggcgtctctggagatctctgttggatatgtccaaaccatctgaaccgatgttgagcaaacttttcttcaattagtgctacccctagcctatcacatatatcatcattccagactcgatcccttcttatatgaccacgaatccaacacaacatacatatttttgcaagacttatctactgaacatatcgtctttttgtagaccaatattatgcaccatacaacgtagcaggtttaatcgctggcctataaaatttgccttttagcttctatggcaccatatagtcatatagaacgtcagatgctcgacaccacttcacccaccctgcttttattctctggctaacattttcatcgagaaatttgctattttgccgctctcaattttggctgcctgttattatgccatctcgtgtctatgactggtgggaccgtctgtgtctatgatttgtgggtccgatggcatactggcgaagcccacaaatgataatggcaaaattgccaatggctccattttcatcatatccccgtcactttgtagcattgatagtgtttggttcgggagcgaggtggaaaggaggttgagggatgcctggaacagagcggctccaaaaagagaatatccctctagtatgctgaatctcaccgctccccaaaaactatcgaaccttttggctcgcgggacggattggagtcattctatcttctaaatacggaatggagtcattccattcttagaaactgaaacggagccgttccattccaccagtctctagaaccaaacacaacctaaaggtatccttcctaggcactacttgaccttttaaagtaacatctcctttctcacatgtagtgccaaataacacatttcatatattttgttttagttctactatgtctaaaacctttggattctagagtctcccgccacaactcttgttttctatgttgtagcccctttttttttctcgatcgacgcaggagagctgcgtgtcatttcattaagaaagaaagataacagtcccctcaccaccccaacactgttgccaaaacccttttctcacccattgttttgttgtttttttgcttggggcggacatttgcatttatatagacatgcaccactcatagagaacacggtggtttcataaggctgactccagcgggtgcctgtaaaccggcctgtagcctatatttagagaagattctgtcttctatacactccaacagtgtcctctaaatataaatgacgctcctccatcctctctatgtagagactctctctcctcacctttatccatttttatacttcagacaactgattaagcaaaactaaaatatgtataaaatatttgagagtgtgacaaatacttatgtacaaaaatctagagcaaaatctatccctaaggctgtctccagcagcttacccatcccatctcctatttcaaacttcaatctgtgcaatgcagtgtacaatgtaaaataatgttttacacgactatatgcacggtctgctggagacaacctaatatgtgtatttaacgcatagaggacaagatatagagggcgctattggagaggaatgatatatagaggagatgatcttttagtgctcgtaaaggagggatatagaggatatggttgaagatagtctaacattttctgatgacccttgttaaagggcgtctcgtgtctctacagttttgaggaccctgggacgaacacgacactatggaccctatagtttcatgttttttcctctgtaacatggtaaagcctatataggtctaatatatggactgatgacccctctctgtcatgggccctagccccagagccgaccctgccatgtattacactctattgcagctgtggtactcatagatatgatttatttatttatttattttagggattttgtgtttatccctttatgctgtttgatcaggatatagaaattgggaaggctgtcaggcctcagctagctttgagagttcgtgattcttcagttgcttggaagaaggtgcctgcctccacccaccagtttccttctaaatatatagtcattgttaagtgaaaggctgctttacacttgttctacattgcttggatttgcttggtcatcacacccttctccttttccagcttcatggaaaacaagtagttgctgagtgcaaatttgatggtgaccgtattcaaatccacaaaaatggggaagagattcatttcttctctaggtaactgaattggttgctaatacatatttacttcttgcatactcttgaactactggtttcttttctgtttgtctatcttttttatttgcaatattgttcatcctttcagatagcttctgtttgcttcactaactttatatttgtatatcaggagctttcttgatcacactgaatacgcacctgggatgtcaaagattattaaagaaaatatcttggttgacaggtaaactttaatttttttggcaaaaaaacacataaagagtgtttgtacttctagtgccagttttcttcttttctatgaacaactatggcttatgcattttaagacttaagatttggttctgagttcccatggaagaatatctatagtagcactatcttgtttgtcaaaggcaacttgaacaaaaggaatgtatattgtatttacttcaatattaaagattaggcatgatctcctctataggtgtagttagctatgttggaaaccctaaatccctgtacaaggtcagtgttgtatatatattgagttaaatacattggctaggctcaggcctattacaacgtaaacacataatctaacacccctcgcagttgtaattctagccactatagatgttgagactggtccgaaacaacgagaacaccgtcgaggggaggcccttagtgaagatatcggtgaactgggaggtggtcgggatgcggaggacgggaacgttgtcgaccgcgacacactcgtggacaaagtggaggtcaatctccatgtgcttcgtgcgttgatgctgcatgggattggtcatgaggtgtgactgcactgatgttgtcgcagtagacgagtgtggcacgggcaagagggctatgaagcttcggaagcagctaacgctgttggccacgacacgttacttgacctcaacgctggagcgggagacgatggttgccgctctgaggactatgagactaggttgacgcccaggaacatggcgtagtccgaggtggatcgacccgtgttgggacaagtggacaacttgctagatcggcgttggtgtagacaactagctcggatgctagagagggccgaaggagaaggccatggtcgagggtgtcgcggaggcagcaaaggatccgcttcgaagctgtgaggtgtggctctcgcgggatgtgcatgtggaggcacaaatgctggatgacgtatgcgatgtcgggtctagtgaaggtgaggtattggagcgccccgccgaggcttcggtaggtcgtctcgtcacctaccgaggtgccgccgtcgtcggagacctttgcctgggtgttgacaggcgtggagcaaggctttttcgggtaacccgaattttcttttacccgaagtacttgacccgattttttcaggtaactcgaatgcccagacctagttctagccaccaccccacagggacagagtgggcgaggcgggggtccccgggagcggaaggagggatggcagctgcgattggtgctgatggggctgccgtagtgggtggcaagcagagccagctgggtgggtgtgtcgaggaggcacccacagctaggcccaaccacatagagatggtctcagcccacgggttatagaaggacgaccacgcagaaccccctcttctaggaggggcaccaccatgaaggccactgcccccacgaccgaccaccacaggagcaagtagcttgacgaagagccctaggaacaggagtgggggtaggagggtgcggagcccccccggtgagggagggcaaggggactggtcgccgaggatgcgctatagagggtcgtggtagactcggcgcccaaagtgaactcctcgagaaacagctcgttgcggacattgtggaaggacgggaagggcacatcgcgcttgatgagggccttcaggttatcgtagcgtcgattgagaccacacagatggttgaggacaagagtgctggagacgggctcatagagatcccgaagagagttcactatgcccttcattcggcgatagtgcttagtgatagagaggtcaccctgggagaagagccggaaggaggcatcaaggtggagggtgtgggcctcccggttgccaaggaactgggcctcgagtagggatgaaaacggtcggaaacagtatttattcggtaatcagtttttcctttaattgcgaataaataggatatagaatatacaatacaaatttgtattcttgtttttaacatccagcttgttaagattcataaaaggtaaacctcgaattcatcctacattttctcaaataatagatataaacttcggtatggattcggaaacaaattcggtaattttttcaactttttgtgttgtagggagcaaataatacataaaacaacttatataatattttattcatatttgtactaatgtgcttgataacataagaaaagatcaacatcaaattttatacatatttattttaaaatattaaatttgttctaacagttcggattaccactttcatccctagcctcgaggcaacctaggcctgatgagtgatgtatctgcttgcggacgacgttctagagtttgatggtgaggttatcgaggagccacgagagtaccacgctgtccatccgacgccaggatgggagcaggtgggaaacaacgtcagcaatgatgtggccgtcaacgacgtagcagtgaagggtgaggtgcagtgaggggacgcaccgttgaggacgacgtagacgagcgaccaaatgttctggacacctatcgccttagcgtggaggttagcgatgaccgcgacctcatacttcgaggggggagggaccaacggggcatcggaagaggcgagccgagtaggtgatgtttagcatcgactagcttcaaggcgagggcatccaacacgttgtgctcctgctcccagcgaggaccgcatcacgttcgtggtcctaggcagcagccgcgacgaccttagtagcggtgagtgtcgtggccaaggtggactgagcagcggcgatgtctgaggagggaaaggacgtcagagcaggttgggaccatgcgactgcagtagatggtggggcgaaggagctggtcgcgttcagggagggggcggcgccgacaggcaagaggccggcggccgcaccagaggcaggtgctggcggggtggaagtggaggcgacctggccccctgcgtgcgtgttggcacttggcagcaggggcagacgcgtgcgtggtgggctggagccagggagggcatgggcgggcgtgacctaggtgccgttggacgcgcccggggcaaccttcgttgcgacgttgcccatctccgggagagtgtggggggggagggagggaggctggcgggttgctccatggccggtgatggtggcccgagggtggtgggagggagagggaggaaagaaagaggcttgataccatgttggaaaacctaaccctaaaacaagatggctgttgtatatatattgagttaaatatatgggctgggcaaggtacattacaacagtaaacacataatctaacaagctagttattgatgagcttgaggtattaacttgttatgagcctatagaagtaatactgtaatttttttcgatattgcaatctggccttttagacaatataagcttcgttttggatatctgttggacctttttgttttcttttcattttgcaaacttccttgaagctcactctagttctgatgctaattggtactgataatgcagatgtatattggacggagaaatgcttgtctgggacactgtacttaaccgttttgctgaatttggctcaaaccaggaaataggtttttggatattccattgaaaatcagaaagttttatttctccaggatatttttatagtggattaatgttactatttttgcagctaaggctgcaagagagggattggagactgatcgacaggttgttttcacaaaactttttttccgtgtttcagagcgatccttctataaaatttcctatctaacttaatttactctgtgcctgcagttgtgttgtatcctttattttctttactacctgcattcttactttttgtcttgatattcttcactattccttttttttaagtaagacccttagctgcatgtttggcaacaagatatacatttgttttaatttccgttaaccttttttttgtttttggatctgtttcctagcatatgtcggcctaggtttaatgtttgctctcaaatttccagatgttttatatttttttgtttgtcatgttttacttgacactagcgatgcatagatgttgtttttgacatcctttatgctggagacaccagtgttatccaccaaagtttgacggagcggcatcaaattctgcagaaggttgtgaaacagttaaagggtcatcttgagattttgatcccaagacgtggtttaaatgtccctcgcccttcaggtagctgatgactattttacaattgtatttttattttctcatggatgcatttgggttcacccacgtccaaatagatgacattgtacaatggattccggtagcttgatctagaatgctgataggatttcttttgctgcattttaaattttgttcagaagatcacctgttatgttctattatatatctgttgtaaacctattactatgcaatactaagggtctgcttggatgtagatattgaagatgttccaaatctgtctagtattagaaatggattgcaaaatctgttgtttagatgtaactggaattgcaatttcagccaacacagagggtctaggctctgaattgtgagagacaacttctagttatagtccaatactgagaaattgaggtttaaacccaaatctgaattcattagactaacaaacagcagaattcaagaatcctgattccaattcccaattccagacttcaatatctacacccaaccggggtgtaaacttatttacaatatgcagatgaaccatgctggtcgattattgcacataatgctgaagacgttgataaattcttcaaagagactatcgagaacaggtttctttgtaccttcttagttaatcgaacccatttagtgtcaattttatgattttcaattcattaattgtggttagagatgagggcattgtactgaaggaccttgattccaaatgggaacctggtgatcgaaatggaaagtggcttaaactaaagcctgattatatacacgcgggtgccgatctggatgttattattataggtaagcatctttcttcatgtgtgaagagcaaatgattgaccttttgaaactattgattgagggtatgttggcccctttgttgtcagggggatactatggatcaggacgtcaaggtggagaggtgcactagacttggcttactgttttaatttcagcattagggttatctgggtgtgaatgttataatgtcttgctagtgcattgtcttctactgttcctatataatcatcaaaggacatagaaatacattttgtttaatgtcaaaaacgcactcttagctttattcttttgaagctattaaaaagtaaaaactgctgatcattgttcttaactgatttataggtcgcacagtttttagttggccttgcagtcccttcagatgataatagttatcccaaaaggtaagcagagtttctccaccactgtatgtttcatagaagcaattgtaggtgaagatcataatgaaaagcaaattgtgatcatccttaaaactcgaccatgggaagaagatgctccttggctttgcattaaagatccttggttatagccttgttggccgtcctctcaagtctcagcttgaggctctaccaactgagttattgcttggttcttagatgtggttgcctaatatagcgaagagcagtatcgcgcccattcgttgcacacatgatgatttgaatttggtccagcagctccttccctgcagatttgaaacttttccaattaaatacttgggcctccctctctccctgaagttgtctaaggctcaacttcagcctctcattgacaaggtggctgacctcttatcggcttggaaagctgacccgatgacccgtgctggcagagctacccaggtgcaatttgtgctcactgctactgttatctatcatatgatggtactggatctgcctaagtgggttattaaagtcattgataaaatccgtcgcgggttcttgtggagagggcgtaaagaggctaatggtggccattgtatggtggcctggggcaaggtaacacgccccaaagagttggggggccttggtatctctgacattcaatgtgtaaatagggccttacgtgctagatagatttggctccaaaaaatcgattcttccaaaccttggactgacttgcctttccaatcaaatcggtttttggataacttgtgctctttggcaatggcctccatggtgggtgatgggcagtccactcttttttggcaatgacagatggctcttgggtcagaggattgcagacttgacccctcatgtttttagtttggttcctaaaaggctggtgaagagaaggacattggctgatgctctgtgtagttcttcatggattggggatttaaggggagtggtaacgtgggaggtaattgctgacttcattattctggcagatgctgtggctgatgttgatcttcaaccgggagttccagataaacattattggaggttctcttccaatggtatctattcggccaaatctgcttatgagataatgttctgcggctctatctccctggcgggctttgaaagagtgtggagcacctgggcgccgcctaagtgtcagtttttcctctggttggtcttacataacaaatgttggacgactgaccggctcactaagaagggtcttccccatcctagtacttgccccttatgtgaccaggtaggaaggggagtctattcatcacttgcttgtttcctgtcttctcgcgaggcaattttggtttctccttctccaacgtgtcggcctggccgccctttccccggggatggaagatataagttttgaagcttggtggagtagatcggctgaggttgttcctaaggacctcagagatggctttaactccttggtggtcctggggcttggagtatctggagacatcgaaatgattgtgttttcaatggtgctcaaccttctatagctatattgcttacctaagtcggtgatgagttcgatatgtggtgttttgcgggggccaaaggcttgacccgtctttcagacctagcttttgtgttcaaccccggctaggaggcggttttacctcttgttgtttgtgtgtgcgtgtgtgagtggtgtgttaagtccttgtatatactgttttttcttttcttcttctaatgaaatgatacgcaactctcctgcgtgttcgagaaaaaggaaggttttgtactttggtgagttgctgataggtttgcatggataccttttttgtgtctttaagtattatatattctaatactagtatatgcatttcatacctgtgcttggcaaaacatagaaaacaattgcccattttatttattgatgtgatgtttcttgttatcaaacatgtctaatgaggttttatatggtaagaactttgttttgtcatttcatggtgtttcctttttcccacaacagagcccaaattttcttactaaggcaatacagcatcatggtttaaccatctaactctgatgtttcttgttttctgtccttgcgtacactttccaaggttcctttcgttttgccgagttggtactggcctctctgatgaagagcgtgatgctcttgtcaccaaactgaacccttatttcaggtattcaactttgattattatgtttcatatttactgaatcagtattttgtgtaagtacgtttccttgaagcttcaaaacctatttattactaaggaattaaagttccttctcattctgtcatattgtgctattttttgaatcaggaaaaatgagtaccccaaaaaaccaccaaaattctatgaagttacaaataactcaaaggagagaccagatgtttggattgaaagtcctgataagtaagtttttttttaattctttgattgagagccattttcttagatataggaagcacatgatatgctaaatcactaattgcattttcaggtcagtcataatatctgtaacaagtgacattcgtacaatcaagtctgaggtatttgatttaaagaatcaaatacttatatgttctgcagttctgtctttaaaagcattaattcttggactgatttctcttgtgcagtcagctggtgtattttctcttctaacttacttttaatgttttcaaccttatgcaggtatttgctgctccatactgtttgaggttcccccgtattcagcgagtgagatatgacaagccatggcatgagtgccttgatgtgcagggtaattgtttttcttatacttaatattttgtgtctgtattctttgttcttttagtagcttacaataagctacatccctcgtgatgccctaatctaggttatatctcgaagatgatttctctataacacgctgatcattgcagcatttgtggacattgtgcattcaaataatggtacaatacaaagggtggcagatgataatagcctgaagaatgatgacacaaaacattcaagaacaaacaaaaaagtagagaagtgtgtctcaatcatcccttcacatttcatgaaaactgatgtatcaggtctcaagggagaaaccttgatatttgccaacctgattttctgtatcctttccagtgttattctttgctagctatcatggtttttaaagcggtaaggcggtccaaggcgttggaccaccgcctggacgcctagacggcgcctaggcgacgcctaggcgaggtaggcgggcaaggcgcctaggcgttagaccaccgcccggacgcctaggcgtcgcctaggcgacgccttaagaacagagctagctatacttatttacaagacaaaggccagaaaattgtataaagtaggagtattccttatcttacttagattttgtcaacattccatcatcatataatctcgaatattttcataaactggttgtggaaaatgggggatctttctccatgaatctcaatgactctgttacacactgcatagctgcggagaagaaaggtatttacctttgttttaggagttcctttttctttgataatgggatattgaatacatagtttgaagtatatttgcctgttatattttccaggtatcaaatatcaggcagctttacgacagggaagaatcattcactatgagtggatattagactgttgcaaggaaaaacatcttcttcatttgcatcctaggttggaccccttttacttaaccacatttacctcataacttatttagaaaataattctaatgcaattataattgtacaggtatatactatttattgctgatttcgctaggcacaaatttcctgaagagatcgattcatacgctgactattactactgggacattgaaattgctgacctcaagcaggtacagtactgcactatatccttttatcacttcaaaataaaaataatactttattgtgtaggacaatataacaataattcaaaattgaagatgtatcattgtggggcctgaattagtgtaactaagtaactatgcaatcaaccagttagtagaagttgcatatgatacaacattgaaccataatatgacttgtagtttatttatataagcgagattatattttacgaaaggtcttggcggggcacaactaaccattttaggggcttatagcttatgtggtgatatgattggtcgatttatttttggaacttggtatgcatgtaattagatttgaaccgatggggtttgtgtgttatttcttcttaatgcaatgattcatagctttcctatatatttgagagaaaaatattttgtgaataacctctcacggaatagaactatcgaaatgtggcatatcttctagatacaacaacaacaaagtgttttaatttcaagcaagttgggataggctagagttgaaacccaatagaaactacaagtccaagttcatgcacatggatagatgttttccatgcactcctactcaaggataaatctttatatatattttattctttttctacttttattgtctctttttgtcaacttcgattttttcctgcctctctttccatcactatcgtgtcttaggcatggtttttaaagcggtaaggcggtccaaggcgttggagcaccgcctggacgcctaggcgaggtaggcgggcaaggcgcctaggcgttagaccaccgcccggacgcctaggcgacgccttaacaacagaggtcttagggtcccactacacacttgtgcctttggaggtctccgacatgtctaaaccatctcaaatgatattagacaaacttttatttaattggtactatccctagcctatcccgtatatcattgttttaggctcgcttccttgattctcttcttatatgcccacaaaaccaacataacatacatatgtccacaacatttatctattgtctattaaacatgtcatctttttttggccaatattctacaccatacaacatagcagatctaatcgccgtcctataaaacttgccttttagcttctatgttaccctcttgtcaaatagaatggcagttgtttgacgccactttatccactatgctttgattctatggttaatatcatcaatatcatcgtctctctgtaggattgatcataaatactgaaagttatcctttatgggcattgggcactacttaacctttcaaactagcatcttcttcctcatgtgtagtagtgccaaagtcatatattatatattcaattttagttgagttgaaaacctttggactctggaatctcccgccacaactctagggggtgtttggtttgaagaatcaatctattctagatgaggtggtgcatcatgagtccattccacaaatttggtggaatgaactcatttctcatattattactaattattagcttatgagaaatgaaattgtgatggatcaactcatttcattccacaaaccaaacaagaaagtgacgagtgaaaagatgatggactacctcattcctcaaacgaaacacacttctaattttccatttactcctgctcgactttcattagttaacactacattgctgtaaaaaaacatacaccaagggatatcgccttgtatgtcatttgtgacctcatccatcaacaatgtgaaatggtaaagggctcaacacagtttgagccttgtgagagaatttggcattcttgggctcctctggaaatgtaaatttttcttgtggcttgtggctcttagaagatgctggacaatagatcggctgcaaaagcgggggcttcgacaccctgattgttgccctctttgtgatcaagaacctgaaaatatcgaccatttgatggttggatgagtttttgcaagacaattctggttcaggttacttagacaggtcaatctttagagcctcactcctcagccgggtgaaaggaacaccatggattggtggaggatggctaatgatcaggtgcaaggcattgccgcaaaagggcttaattccttaatcatccaagggttttgaaaactgaagaagatagagagttgtgggagatggccgggaccaagagtttgtccctcctaatggcccctattcctggattgtagccttaggtggtcgctttagtagtttgtttcctatggatgtctatttgtatttttgtttttggccgctgtaaggtggtttttctctctcttatattggtctattttggaccctcctatcttcttaatataacgatgtgcggttctcctgcgcgttcaagggtaaagggctcaaagctggcccttgataatcttattctaaggctggtggcaacgcgggcggtagcgcgggcgagagagagccgctaccgcccgcgcgtgggcgagaggcgggcgagagagggtcgtcgggcgacggcgctcgcgcccggcgagagcgggcggtatcgcctcgctctcgcccgcgctggagcgcccgcccgggcgagaggcgggcgagagggaggcgaggcactggcggggcgagagcgacgtggcgcgatctgactggtccacgtgtcgcgatctgattggtccacgtgtgctagccgttgcaactagccgtttttgaccgtttggagtccaaaaaatcacaaatttcatccccaatccctctatatatatccctacccgggtggagctcattccacacaccatttcatctcatttctctcttccaaactcgccttttctactcatcttcacgtcatgtcttcctcgagcacaaactcaagtgaaggagccgaaggggcaatgtgcaatgcattgcaagcagccatggaggaggctatgctcaacctcaatgaagagtcgtcgagccggcccaagcgtcgtcgacgctacatcaatcgtgatcgtgagtctgcccatgatcggcttcatcaagactacttcgccgatgactgtgtgtatcctccaaattactttcggcgcaggtatcgcatgaggcgacaactttttttgagtattatgctaagattaggtgaatactctccgtatttcacccaaagagaagatgctctgggtcgactcgggctctctcccctacaaaagtgcaccgcagctctgcgcttgttagcctatggatccgctgcagattcgatagatgagtacttaaagctagctagatcaactgcattagagtgtctagagaagttttgtgagggtattcattcattgttatagggaggagttctgtcgtcgatgagtacataataatcattagatttatgtaattttctattaattattatgtatttttaaatcgtcatgtaattttattttaattattacgcaatttgtaatttttaattcaataaaaaatattatgttgtgtgttttctgagcgttgaaataaatccgcgtgaattacttaattctgaaatagaaaagctgatgtggctatagcctgaggctgcagcctgtgcactggagcagcagaggcgagagtggaggcgagagctgacgtggcaggggcgagagggaggctgtgcactggactcagcctaatataaaagtcatctgtgtctccatcacttgttcgaacactagtcataaccttgtttacatgttcttaatgagtccaacatactttgttgggccttaatgtttgtccaaagagttggagaatgagaaaacccccttaaccctaactagggtagggactggtatatattgatagatgttgggcctggcccattatacaagggtgtgacaataattacaaggggctaaccccaaaaccctaggctggtactataacacaaagcccaccaaataatattattattattttttatcataagccttctctaaatcaatgaaaaccatgtctaggtccttcttgtgctctctatactgctccatcacttgttttattaagaaaataacttccatggttgacctttcgtcatagttattaaggtggtaaggcgaccgaccccctttttaacttttaagcggtaaagcgtaaggcgaggcgacaccttattatatagtaactagtcggttgcccgtgcgttgcgacggcttacagcaatacccacgtaaactatcttattgattgtctccgctctctgtataatattttgatttggctaactgatgttattgtttactccatccaatatgttttggtacaacacagccaatgaaatgagcgattagaagagagttcacaacgactgactgaacgaacaaagattatagaatgacataattccaccatacagagaccaaataagagaaaatatgtgagctcaagtttctaaaataagtcacatgaactcaaacttataaaaaatatagatcaaaatatggagtggttgctaaagtcagacatcaataaaaattggatgtgctccatataaattatgctacttcgtagcaattactaacttttaaaaccaacaaatagcctttcattttactgttagtgtgacaaatcattgttgctccatccaattcagcaacctcaaacaccatgtagtctattgcgccaatgtggtctcagaaacgacctaatgcttgcaagagccaagaacgtcgtaccgtgcttggctgtagcctcggcccgtagtgctggcccaacccgacacgattctatttttttgttttacaaaaaacgtatatacatatatacaatctatattcaatattaaaaacatttgagcattatgttctactggttagacagcttcactcagtatctcttgcccttttttccattagggcatgggttcgaacccacctcctgcactgtttttaatattttacgttgatttaatcaaatgggccgctgtggcccacaggcgctcctgtttttttaacattttacactgatttaatcaaataggccgacaggctaacgggccgctgtggcccacgagcgtctggcccgtgccgtgccgccgtttggccatctatatgtggaggtgtgttttgggatgtgggggttggttgcgcggaccggacgaacgtgcagcggattaatttgaaatagctgtgaggggttatttgtaaaaagatgatgcgtgatgaccgttgaaactggtgctttaagtatagtagagatataacaccttaatataaaatattagaccaaatattatttatataacatcgattcaaaattaataagctagcacaactataaggcctagtcgacccatttcaacctagtagaaatgagaaataggaaaaaaaggaaaaaaaatcctactacaaagcccaactaacctagcccaatagtgtagcccaacagttttaggttaaaacctacaatctcggaccaaaactcttcctcctctcctgcgcagccgctagtcgccagtcactgctctctctcccctacaactcctctctcctccctgcaccgcgtagctccttctctgtccctcaccgtagctcctcatttcctgactgaccagctatggcctcgcgccgccgccgccctccacagctcctctctccctaactagtcggctgggaccacgcgtcgccgtcgctgcggcctgtgcgcgtcgtcgcaacgcgctgacattaggtcaatacatccaaggagcgatgccttaactgggttcaaggcgccagagcgacgccttagcagatgaagcggacgccttaggctaatgagtaaggcgacttggacgctttacggctgacctcgccttactgcttaaactatgccttaacaaaattggttcatagaaatctttgttattcgtcttagatgatgctcgattactcgtagcttcatagtatggcggtatggcccatcaacttaattcctcgataattggtacaactttaaatatcttcgttattcttatagattgctaccaatatatttctccttcactcgtcggacatcttgttcaaccgtaagatgtggatgagcaacttgggtagccatactactactatgtccccgagacatctctatgcctcaattgggatactattatggtccattgccttacccttttcatcctttccaatccctcttcaacctcgaatcctacacacgaagcgtctattggtgtcagtgtcatccaactgaaaggttatgtccccattcttctcatttaacaatttgttaaagtactctcgccctctatgtttgatctcatcttccttcaacaagaggtgctcgtttcatccttaatgtacttaacttggttggagtctcttatctttctctcacggaccctaggtatcctatatatgtccttctccatcgtactcaaacgttgataaaaatcctcgtacgtcttaccctttaccacacttacaacttgctttgcggtcttctttggtaccttatacttctctttgttgtccacactcctgtcatggtataacatcatttcttctccttaatagcactttagacttccttgttcctccaccaagtatctttagctttgtatccactcggaccactccctttggttgctccacacacctgtgaggccacctttcgaatgcaagttgccatcttctcacacacgttgtttgcctcatcttcttccttctaagtgcccttttgatggtcttttctttgaggacttttgacgtctcctcttttagtttccaccactttgttctcgtaatcttggcttgtttatcactatgggcacacaaacctaaaaacgaaagaccgccaccacaagcttatgttgagagacaacacactttctaggtatcactttgcaatccaagcatgctcgattgtcctctctttttgtgaggacaatcaatttgactggagtattgaccactactatagtataggtcactaaatgggattctctctttctaaagaaaagtgttggctttcaacaggtcaaaagctatcacaaagtccaagacttcatgtcctaactgattcctactaccatacccaaaatctctatgaaccacctcgaaaccggcatatcttctagatagaaaggacaaaaatcatgtgttccctcagtagaagtgtgatttgcttcccataagagtctccaccaatcctcttttgtttcattgttcgcacaacttttccgaaatatgatcaaatttaggaaaatcagtactaataattgaactagagagatcatagagacccttagagcttgtttgggagcacggggattggaggggattgagggggctaaaatcccctttctattcaaaatttagcaaaggggatattttagccccctcaatcccctccaatccccgtgctcccaaacacgcccttaggggcactcatttgcacctttatccctcgagcatacgtgaaccatataggaataaaggatttgaactcttctaatctcttcctaaatatgatccatccaaaagactgaaactgatcaatgttggatttgcgtggtagcacccaacgacgggttgtcatatgatacttttccacagcctcctgttgtttgcaacttttccctggcatcataagtttgtctttattttgtcacagtggttttttgtacttagaagcatgcgttttgtagaatggcaataaaagagatgttgctattacttgaaatttttacctttgtcaaggatagattcacaatgaaccattttgacatttcctttttttcatgcaccagattttctgtaacattgacaaagtttctggtgattcaaacatggttattcagtacaaaaagaagcattgcatagatgaaagattctgtttcttccagggttgctgtgtctacttgcataatgcgcccttagtgtaagcttcatttactgtcaagtagcatgtctttcacatgatacatctcctcatttgtttttttcaccttttttcctggaggaatgcggactacaatgtaatatctgatcttgcactgaagagggtgaagcaggatctaacaatgcatggtggtcaagtctgcagcagtattgctccagctactcatttggtagtagtttcggttttacaggtctataactttgataacctgtacaagaggtactgagttattgctttagatttgctttgtaacttttgtgagcgaagggcaaatagaaaaactttatggtcgtccattggttgtttatgcagcttccctcccgctgaaagacgttatctacatgacaaaagattacatgttgtcagtaacaagtggttggaagattcagtggagaaacaaatgaagctctctgaaactgcttacagccttaaaccagatacactagaagaactagaaattaaaaggaggtaaccggtgattgcccacataacgacactttcaatattaaaaaaaatgcatatggttgtcaatcttctgtctgtttctaatttgtttcagtgaggaaaatgttcagcctccggagcataagtttgaggaacacaaggaggttgaaagatctcatgcggaaaatatgccaaggaaaaggagtaggccaaccagttcaagaactgcaagggctgctcctagagcagtccgccgaataaggcctagaagaggaaaccagaaagcaaaaataggtgatgttgaatctgaagaaagtggccccagcgaatgccaagatgatgaaaatttggacacagatgatacctctaagattgaagaaggtattaccaacaaaaacaaaggactccctgcacctgcttcaaaaccagcctggagaacaggggctacaaaaggaaatcagcatacaaaaatagatgacagcggatctgaagaaagtgggccttgtgaaacagcgcaagatgattacatctctaagatggaagtagataacattgataatgaccgtggaccaccgccaggtgctcagcttttcacgttgggggagcaagaggtcaaaggtgtcaaattgaacaccgtggaggagaaacaagacagccctttccagagaacaaccgctgctgaagcgatgagtagcacgcctggtgagaagatagaacaaatggctgatccgttgcacgccatgcttctggatatgttgccactcctgggccagaaaaggacagaagatacaagcaaggcgcccttggcgaaagctgagaaggatccacctgcgataggaagctccacatccaattctgagattctgttgccagatgctggaacatccggggttccagccccagagccaagtgcagctccaccaaagaagaaaaaagtgagttacagagatgtcgttagtgaacttctgaaagattggtga

SEQ ID NO: 75 - DNA, 23700 bp, Zea mays
tcctcgatccttgtccggtcgtccctctcgaactcgagcacgcagccggcagggaagagacaagcgccggagccagagaagcctgcggccaggccactaggccagggtactccggggaggcgagggagcgcttgagggcaacaggtaggagaagtgaggtgactgctatgaatcctatttattttccaaatattcatttgttttgacacctttcatttttttcctttctgaaaggaaattgcattttcgttttgaccttgggcccctgctgtcccaccgccggtaatggcggcgaaggtgcggttcggcctactggtggcgatgttccaggccatgtcgggcgacaagagttcggcgaagaagcgcggccgcctgcgcgcgttcctcgaccgcgcctacgtgccctgtggcggtagggatgactacttcagcgcgctccgcctcgtgctgccggggctcgaccgtgagcgcggctcctacggtctcaaggaggcggccctcgccgccgtgcttgtggacgcccttggcatcgccaaggactctaccgacgccgtccggctcaccaactggcgccgcggtgggggtggccgcaacgccggcaacttttcgcttgtggccgctgaggtattttatgctggcagttcttcaatagcacttgcaagtcctcaacctcacattctctgcagttaactaattatgccttgctatctcgcccttgtcagacaacagtatgaaatttgttcagttgctaatgtgaacctgcgagcatttgtttagcttagttttaggttggtttcaacgtagtaagtgtgtgaattcggaaagcagcataagctctagccactgagtattagttcagttgctacatgtccataggttcatgctcagcgagtcagcctttatcattgacattgtgtcaagaaatcttcgtatttggtgcacaccatgtgccaataatcctccctgcttaaaaattccgaagctgtcttgatctttatttggttttacatgattgcatgagtttaatatgtagttgaaaagtttggttcagttcagaatgattatatgtagattgcttgattagtgtgccatcttagttgttgtggttcgtcagcaactacttacctaagttatatattgattgccacctagatcttgcaacggaggcaaggtataacttctggcggattgacgataaaggaggtcaatgatgcacttgatcgtctagctacaactgagaacaggtagctgcagcagctatttgaatttgtctatgatagaactgtcaggagttccttttcatcttgataggtctgagaaggctttaatactttccaatctgatcaagaaaaccaatgcccttgaaatgaagtggcttctgatgataattcttaaaggtgtgatacgtgtgcccatttcttatttggtgtgctcttttatgctttgctgcaattgcagtgtttttatttgcttttgttttttggcatattttgctgtagatttgaaattagggataagcgagaagagcatattcgaagaatttcatcctgatgcgcaagacttgttcaatgtcacttgtgacttgaaatttgtctgtgagaagctcaatgatcgaagccaaaggcataaacgccaggtgaaggctttaagctctttttaaatgaacttttgcttatcataacttgtctcttcatgtgcaacattgtacaacaacaacaaagccctttatcccaagcaagctggagtaagctagagttaaaaatccaatagaacccacagtcaaggttcacgaacatgaatagctattttccatgcactcttattcaaggctaaatctttgggtacatcccattctttcaagtctccttttactgtttctttccatgtcaacttcgactttcctcttctcttctcattgtcatcgtgccttaggatcttactacacactggcgtctctggagatctctgttggatatgtccaaaccatctgaaccgatgttgagcaaacttttcttcaattagtgctacccctagcctatcacatatatcatcattccagactcgatcccttcttatatgaccacgaatccaacacaacatacatatttttgcaagacttatctactgaacatatcgtctttttgtagaccaatattatgcaccatacaacgtagcaggtttaatcgctggcctataaaatttgccttttagcttctatggcaccatatagtcatatagaacgtcagatgctcgacaccacttcacccaccctgcttttattctctggctaacattttcatcgagaaatttgctattttgccgctctcaattttggctgcctgttattatgccatctcgtgtctatgactggtgggaccgtctgtgtctatgatttgtgggtccgatggcatactggcgaagcccacaaatgataatggcaaaattgccaatggctccattttcatcatatccccgtcactttgtagcattgatagtgtttggttcgggagcgaggtggaaaggaggttgagggatgcctggaacagagcggctccaaaaagagaatatccctctagtatgctgaatctcaccgctccccaaaaactatcgaaccttttggctcgcgggacggattggagtcattctatcttctaaatacggaatggagtcattccattcttagaaactgaaacggagccgttccattccaccagtctctagaaccaaacacaacctaaaggtatccttcctaggcactacttgaccttttaaagtaacatctcctttctcacatgtagtgccaaataacacatttcatatattttgttttagttctactatgtctaaaacctttggattctagagtctcccgccacaactcttgttttctatgttgtagcccctttttttttctcgatcgacgcaggagagctgcgtgtcatttcattaagaaagaaagataacagtcccctcaccaccccaacactgttgccaaaacccttttctcacccattgttttgttgtttttttgcttggggcggacatttgcatttatatagacatgcaccactcatagagaacacggtggtttcataaggctgactccagcgggtgcctgtaaaccggcctgtagcctatatttagagaagattctgtcttctatacactccaacagtgtcctctaaatataaatgacgctcctccatcctctctatgtagagactctctctcctcacctttatccatttttatacttcagacaactgattaagcaaaactaaaatatgtataaaatatttgagagtgtgacaaatacttatgtacaaaaatctagagcaaaatctatccctaaggctgtctccagcagcttacccatcccatctcctatttcaaacttcaatctgtgcaatgcagtgtacaatgtaaaataatgttttacacgactatatgcacggtctgctggagacaacctaatatgtgtatttaacgcatagaggacaagatatagagggcgctattggagaggaatgatatatagaggagatgatcttttagtgctcgtaaaggagggatatagaggatatggttgaagatagtctaacattttctgatgacccttgttaaagggcgtctcgtgtctctacagttttgaggaccctgggacgaacacgacactatggaccctatagtttcatgttttttcctctgtaacatggtaaagcctatataggtctaatatatggactgatgacccctctctgtcatgggccctagccccagagccgaccctgccatgtattacactctattgcagctgtggtactcatagatatgatttatttatttatttattttagggattttgtgtttatccctttatgctgtttgatcaggatatagaaattgggaaggctgtcaggcctcagctagctttgagagttcgtgattcttcagttgcttggaagaaggtgcctgcctccacccaccagtttccttctaaatatatagtcattgttaagtgaaaggctgctttacacttgttctacattgcttggatttgcttggtcatcacacccttctccttttccagcttcatggaaaacaagtagttgctgagtgcaaatttgatggtgaccgtattcaaatccacaaaaatggggaagagattcatttcttctctaggtaactgaattggttgctaatacatatttacttcttgcatactcttgaactactggtttcttttctgtttgtctatcttttttatttgcaatattgttcatcctttcagatagcttctgtttgcttcactaactttatatttgtatatcaggagctttcttgatcacactgaatacgcacctgggatgtcaaagattattaaagaaaatatcttggttgacaggtaaactttaatttttttggcaaaaaaacacataaagagtgtttgtacttctagtgccagttttcttcttttctatgaacaactatggcttatgcattttaagacttaagatttggttctgagttcccatggaagaatatctatagtagcactatcttgtttgtcaaaggcaacttgaacaaaaggaatgtatattgtatttacttcaatattaaagattaggcatgatctcctctataggtgtagttagctatgttggaaaccctaaatccctgtacaaggtcagtgttgtatatatattgagttaaatacattggctaggctcaggcctattacaacgtaaacacataatctaacacccctcgcagttgtaattctagccactatagatgttgagactggtccgaaacaacgagaacaccgtcgaggggaggcccttagtgaagatatcggtgaactgggaggtggtcgggatgcggaggacgggaacgttgtcgaccgcgacacactcgtggacaaagtggaggtcaatctccatgtgcttcgtgcgttgatgctgcatgggattggtcatgaggtgtgactgcactgatgttgtcgcagtagacgagtgtggcacgggcaagagggctatgaagcttcggaagcagctaacgctgttggccacgacacgttacttgacctcaacgctggagcgggagacgatggttgccgctctgaggactatgagactaggttgacgcccaggaacatggcgtagtccgaggtggatcgacccgtgttgggacaagtggacaacttgctagatcggcgttggtgtagacaactagctcggatgctagagagggccgaaggagaaggccatggtcgagggtgtcgcggaggcagcaaaggatccgcttcgaagctgtgaggtgtggctctcgcgggatgtgcatgtggaggcacaaatgctggatgacgtatgcgatgtcgggtctagtgaaggtgaggtattggagcgccccgccgaggcttcggtaggtcgtctcgtcacctaccgaggtgccgccgtcgtcggagacctttgcctgggtgttgacaggcgtggagcaaggctttttcgggtaacccgaattttcttttacccgaagtacttgacccgattttttcaggtaactcgaatgcccagacctagttctagccaccaccccacagggacagagtgggcgaggcgggggtccccgggagcggaaggagggatggcagctgcgattggtgctgatggggctgccgtagtgggtggcaagcagagccagctgggtgggtgtgtcgaggaggcacccacagctaggcccaaccacatagagatggtctcagcccacgggttatagaaggacgaccacgcagaaccccctcttctaggaggggcaccaccatgaaggccactgcccccacgaccgaccaccacaggagcaagtagcttgacgaagagccctaggaacaggagtgggggtaggagggtgcggagcccccccggtgagggagggcaaggggactggtcgccgaggatgcgctatagagggtcgtggtagactcggcgcccaaagtgaactcctcgagaaacagctcgttgcggacattgtggaaggacgggaagggcacatcgcgcttgatgagggccttcaggttatcgtagcgtcgattgagaccacacagatggttgaggacaagagtgctggagacgggctcatagagatcccgaagagagttcactatgcccttcattcggcgatagtgcttagtgatagagaggtcaccctgggagaagagccggaaggaggcatcaaggtggagggtgtgggcctcccggttgccaaggaactgggcctcgagtagggatgaaaacggtcggaaacagtatttattcggtaatcagtttttcctttaattgcgaataaataggatatagaatatacaatacaaatttgtattcttgtttttaacatccagcttgttaagattcataaaaggtaaacctcgaattcatcctacattttctcaaataatagatataaacttcggtatggattcggaaacaaattcggtaattttttcaactttttgtgttgtagggagcaaataatacataaaacaacttatataatattttattcatatttgtactaatgtgcttgataacataagaaaagatcaacatcaaattttatacatatttattttaaaatattaaatttgttctaacagttcggattaccactttcatccctagcctcgaggcaacctaggcctgatgagtgatgtatctgcttgcggacgacgttctagagtttgatggtgaggttatcgaggagccacgagagtaccacgctgtccatccgacgccaggatgggagcaggtgggaaacaacgtcagcaatgatgtggccgtcaacgacgtagcagtgaagggtgaggtgcagtgaggggacgcaccgttgaggacgacgtagacgagcgaccaaatgttctggacacctatcgccttagcgtggaggttagcgatgaccgcgacctcatacttcgaggggggagggaccaacggggcatcggaagaggcgagccgagtaggtgatgtttagcatcgactagcttcaaggcgagggcatccaacacgttgtgctcctgctcccagcgaggaccgcatcacgttcgtggtcctaggcagcagccgcgacgaccttagtagcggtgagtgtcgtggccaaggtggactgagcagcggcgatgtctgaggagggaaaggacgtcagagcaggttgggaccatgcgactgcagtagatggtggggcgaaggagctggtcgcgttcagggagggggcggcgccgacaggcaagaggccggcggccgcaccagaggcaggtgctggcggggtggaagtggaggcgacctggccccctgcgtgcgtgttggcacttggcagcaggggcagacgcgtgcgtggtgggctggagccagggagggcatgggcgggcgtgacctaggtgccgttggacgcgcccggggcaaccttcgttgcgacgttgcccatctccgggagagtgtggggggggagggagggaggctggcgggttgctccatggccggtgatggtggcccgagggtggtgggagggagagggaggaaagaaagaggcttgataccatgttggaaaacctaaccctaaaacaagatggctgttgtatatatattgagttaaatatatgggctgggcaaggtacattacaacagtaaacacataatctaacaagctagttattgatgagcttgaggtattaacttgttatgagcctatagaagtaatactgtaatttttttcgatattgcaatctggccttttagacaatataagcttcgttttggatatctgttggacctttttgttttcttttcattttgcaaacttccttgaagctcactctagttctgatgctaattggtactgataatgcagatgtatattggacggagaaatgcttgtctgggacactgtacttaaccgttttgctgaatttggctcaaaccaggaaataggtttttggatattccattgaaaatcagaaagttttatttctccaggatatttttatagtggattaatgttactatttttgcagctaaggctgcaagagagggattggagactgatcgacaggttgttttcacaaaactttttttccgtgtttcagagcgatccttctataaaatttcctatctaacttaatttactctgtgcctgcagttgtgttgtatcctttattttctttactacctgcattcttactttttgtcttgatattcttcactattccttttttttaagtaagacccttagctgcatgtttggcaacaagatatacatttgttttaatttccgttaaccttttttttgtttttggatctgtttcctagcatatgtcggcctaggtttaatgtttgctctcaaatttccagatgttttatatttttttgtttgtcatgttttacttgacactagcgatgcatagatgttgtttttgacatcctttatgctggagacaccagtgttatccaccaaagtttgacggagcggcatcaaattctgcagaaggttgtgaaacagttaaagggtcatcttgagattttgatcccaagacgtggtttaaatgtccctcgcccttcaggtagctgatgactattttacaattgtatttttattttctcatggatgcatttgggttcacccacgtccaaatagatgacattgtacaatggattccggtagcttgatctagaatgctgataggatttcttttgctgcattttaaattttgttcagaagatcacctgttatgttctattatatatctgttgtaaacctattactatgcaatactaagggtctgcttggatgtagatattgaagatgttccaaatctgtctagtattagaaatggattgcaaaatctgttgtttagatgtaactggaattgcaatttcagccaacacagagggtctaggctctgaattgtgagagacaacttctagttatagtccaatactgagaaattgaggtttaaacccaaatctgaattcattagactaacaaacagcagaattcaagaatcctgattccaattcccaattccagacttcaatatctacacccaaccggggtgtaaacttatttacaatatgcagatgaaccatgctggtcgattattgcacataatgctgaagacgttgataaattcttcaaagagactatcgagaacaggtttctttgtaccttcttagttaatcgaacccatttagtgtcaattttatgattttcaattcattaattgtggttagagatgagggcattgtactgaaggaccttgattccaaatgggaacctggtgatcgaaatggaaagtggcttaaactaaagcctgattatatacacgcgggtgccgatctggatgttattattataggtaagcatctttcttcatgtgtgaagagcaaatgattgaccttttgaaactattgattgagggtatgttggcccctttgttgtcagggggatactatggatcaggacgtcaaggtggagaggtgcactagacttggcttactgttttaatttcagcattagggttatctgggtgtgaatgttataatgtcttgctagtgcattgtcttctactgttcctatataatcatcaaaggacatagaaatacattttgtttaatgtcaaaaacgcactcttagctttattcttttgaagctattaaaaagtaaaaactgctgatcattgttcttaactgatttataggtcgcacagtttttagttggccttgcagtcccttcagatgataatagttatcccaaaaggtaagcagagtttctccaccactgtatgtttcatagaagcaattgtaggtgaagatcataatgaaaagcaaattgtgatcatccttaaaactcgaccatgggaagaagatgctccttggctttgcattaaagatccttggttatagccttgttggccgtcctctcaagtctcagcttgaggctctaccaactgagttattgcttggttcttagatgtggttgcctaatatagcgaagagcagtatcgcgcccattcgttgcacacatgatgatttgaatttggtccagcagctccttccctgcagatttgaaacttttccaattaaatacttgggcctccctctctccctgaagttgtctaaggctcaacttcagcctctcattgacaaggtggctgacctcttatcggcttggaaagctgacccgatgacccgtgctggcagagctacccaggtgcaatttgtgctcactgctactgttatctatcatatgatggtactggatctgcctaagtgggttattaaagtcattgataaaatccgtcgcgggttcttgtggagagggcgtaaagaggctaatggtggccattgtatggtggcctggggcaaggtaacacgccccaaagagttggggggccttggtatctctgacattcaatgtgtaaatagggccttacgtgctagatagatttggctccaaaaaatcgattcttccaaaccttggactgacttgcctttccaatcaaatcggtttttggataacttgtgctctttggcaatggcctccatggtgggtgatgggcagtccactcttttttggcaatgacagatggctcttgggtcagaggattgcagacttgacccctcatgtttttagtttggttcctaaaaggctggtgaagagaaggacattggctgatgctctgtgtagttcttcatggattggggatttaaggggagtggtaacgtgggaggtaattgctgacttcattattctggcagatgctgtggctgatgttgatcttcaaccgggagttccagataaacattattggaggttctcttccaatggtatctattcggccaaatctgcttatgagataatgttctgcggctctatctccctggcgggctttgaaagagtgtggagcacctgggcgccgcctaagtgtcagtttttcctctggttggtcttacataacaaatgttggacgactgaccggctcactaagaagggtcttccccatcctagtacttgccccttatgtgaccaggtaggaaggggagtctattcatcacttgcttgtttcctgtcttctcgcgaggcaattttggtttctccttctccaacgtgtcggcctggccgccctttccccggggatggaagatataagttttgaagcttggtggagtagatcggctgaggttgttcctaaggacctcagagatggctttaactccttggtggtcctggggcttggagtatctggagacatcgaaatgattgtgttttcaatggtgctcaaccttctatagctatattgcttacctaagtcggtgatgagttcgatatgtggtgttttgcgggggccaaaggcttgacccgtctttcagacctagcttttgtgttcaaccccggctaggaggcggttttacctcttgttgtttgtgtgtgcgtgtgtgagtggtgtgttaagtccttgtatatactgttttttcttttcttcttctaatgaaatgatacgcaactctcctgcgtgttcgagaaaaaggaaggttttgtactttggtgagttgctgataggtttgcatggataccttttttgtgtctttaagtattatatattctaatactagtatatgcatttcatacctgtgcttggcaaaacatagaaaacaattgcccattttatttattgatgtgatgtttcttgttatcaaacatgtctaatgaggttttatatggtaagaactttgttttgtcatttcatggtgtttcctttttcccacaacagagcccaaattttcttactaaggcaatacagcatcatggtttaaccatctaactctgatgtttcttgttttctgtccttgcgtacactttccaaggttcctttcgttttgccgagttggtactggcctctctgatgaagagcgtgatgctcttgtcaccaaactgaacccttatttcaggtattcaactttgattattatgtttcatatttactgaatcagtattttgtgtaagtacgtttccttgaagcttcaaaacctatttattactaaggaattaaagttccttctcattctgtcatattgtgctattttttgaatcaggaaaaatgagtaccccaaaaaaccaccaaaattctatgaagttacaaataactcaaaggagagaccagatgtttggattgaaagtcctgataagtaagtttttttttaattctttgattgagagccattttcttagatataggaagcacatgatatgctaaatcactaattgcattttcaggtcagtcataatatctgtaacaagtgacattcgtacaatcaagtctgaggtatttgatttaaagaatcaaatacttatatgttctgcagttctgtctttaaaagcattaattcttggactgatttctcttgtgcagtcagctggtgtattttctcttctaacttacttttaatgttttcaaccttatgcaggtatttgctgctccatactgtttgaggttcccccgtattcagcgagtgagatatgacaagccatggcatgagtgccttgatgtgcagggtaattgtttttcttatacttaatattttgtgtctgtattctttgttcttttagtagcttacaataagctacatccctcgtgatgccctaatctaggttatatctcgaagatgatttctctataacacgctgatcattgcagcatttgtggacattgtgcattcaaataatggtacaatacaaagggtggcagatgataatagcctgaagaatgatgacacaaaacattcaagaacaaacaaaaaagtagagaagtgtgtctcaatcatcccttcacatttcatgaaaactgatgtatcaggtctcaagggagaaaccttgatatttgccaacctgattttctgtatcctttccagtgttattctttgctagctatcatggtttttaaagcggtaaggcggtccaaggcgttggaccaccgcctggacgcctagacggcgcctaggcgacgcctaggcgaggtaggcgggcaaggcgcctaggcgttagaccaccgcccggacgcctaggcgtcgcctaggcgacgccttaagaacagagctagctatacttatttacaagacaaaggccagaaaattgtataaagtaggagtattccttatcttacttagattttgtcaacattccatcatcatataatctcgaatattttcataaactggttgtggaaaatgggggatctttctccatgaatctcaatgactctgttacacactgcatagctgcggagaagaaaggtatttacctttgttttaggagttcctttttctttgataatgggatattgaatacatagtttgaagtatatttgcctgttatattttccaggtatcaaatatcaggcagctttacgacagggaagaatcattcactatgagtggatattagactgttgcaaggaaaaacatcttcttcatttgcatcctaggttggaccccttttacttaaccacatttacctcataacttatttagaaaataattctaatgcaattataattgtacaggtatatactatttattgctgatttcgctaggcacaaatttcctgaagagatcgattcatacgctgactattactactgggacattgaaattgctgacctcaagcaggtacagtactgcactatatccttttatcacttcaaaataaaaataatactttattgtgtaggacaatataacaataattcaaaattgaagatgtatcattgtggggcctgaattagtgtaactaagtaactatgcaatcaaccagttagtagaagttgcatatgatacaacattgaaccataatatgacttgtagtttatttatataagcgagattatattttacgaaaggtcttggcggggcacaactaaccattttaggggcttatagcttatgtggtgatatgattggtcgatttatttttggaacttggtatgcatgtaattagatttgaaccgatggggtttgtgtgttatttcttcttaatgcaatgattcatagctttcctatatatttgagagaaaaatattttgtgaataacctctcacggaatagaactatcgaaatgtggcatatcttctagatacaacaacaacaaagtgttttaatttcaagcaagttgggataggctagagttgaaacccaatagaaactacaagtccaagttcatgcacatggatagatgttttccatgcactcctactcaaggataaatctttatatatattttattctttttctacttttattgtctctttttgtcaacttcgattttttcctgcctctctttccatcactatcgtgtcttaggcatggtttttaaagcggtaaggcggtccaaggcgttggagcaccgcctggacgcctaggcgaggtaggcgggcaaggcgcctaggcgttagaccaccgcccggacgcctaggcgacgccttaacaacagaggtcttagggtcccactacacacttgtgcctttggaggtctccgacatgtctaaaccatctcaaatgatattagacaaacttttatttaattggtactatccctagcctatcccgtatatcattgttttaggctcgcttccttgattctcttcttatatgcccacaaaaccaacataacatacatatgtccacaacatttatctattgtctattaaacatgtcatctttttttggccaatattctacaccatacaacatagcagatctaatcgccgtcctataaaacttgccttttagcttctatgttaccctcttgtcaaatagaatggcagttgtttgacgccactttatccactatgctttgattctatggttaatatcatcaatatcatcgtctctctgtaggattgatcataaatactgaaagttatcctttatgggcattgggcactacttaacctttcaaactagcatcttcttcctcatgtgtagtagtgccaaagtcatatattatatattcaattttagttgagttgaaaacctttggactctggaatctcccgccacaactctagggggtgtttggtttgaagaatcaatctattctagatgaggtggtgcatcatgagtccattccacaaatttggtggaatgaactcatttctcatattattactaattattagcttatgagaaatgaaattgtgatggatcaactcatttcattccacaaaccaaacaagaaagtgacgagtgaaaagatgatggactacctcattcctcaaacgaaacacacttctaattttccatttactcctgctcgactttcattagttaacactacattgctgtaaaaaaacatacaccaagggatatcgccttgtatgtcatttgtgacctcatccatcaacaatgtgaaatggtaaagggctcaacacagtttgagccttgtgagagaatttggcattcttgggctcctctggaaatgtaaatttttcttgtggcttgtggctcttagaagatgctggacaatagatcggctgcaaaagcgggggcttcgacaccctgattgttgccctctttgtgatcaagaacctgaaaatatcgaccatttgatggttggatgagtttttgcaagacaattctggttcaggttacttagacaggtcaatctttagagcctcactcctcagccgggtgaaaggaacaccatggattggtggaggatggctaatgatcaggtgcaaggcattgccgcaaaagggcttaattccttaatcatccaagggttttgaaaactgaagaagatagagagttgtgggagatggccgggaccaagagtttgtccctcctaatggcccctattcctggattgtagccttaggtggtcgctttagtagtttgtttcctatggatgtctatttgtatttttgtttttggccgctgtaaggtggtttttctctctcttatattggtctattttggaccctcctatcttcttaatataacgatgtgcggttctcctgcgcgttcaagggtaaagggctcaaagctggcccttgataatcttattctaaggctggtggcaacgcgggcggtagcgcgggcgagagagagccgctaccgcccgcgcgtgggcgagaggcgggcgagagagggtcgtcgggcgacggcgctcgcgcccggcgagagcgggcggtatcgcctcgctctcgcccgcgctggagcgcccgcccgggcgagaggcgggcgagagggaggcgaggcactggcggggcgagagcgacgtggcgcgatctgactggtccacgtgtcgcgatctgattggtccacgtgtgctagccgttgcaactagccgtttttgaccgtttggagtccaaaaaatcacaaatttcatccccaatccctctatatatatccctacccgggtggagctcattccacacaccatttcatctcatttctctcttccaaactcgccttttctactcatcttcacgtcatgtcttcctcgagcacaaactcaagtgaaggagccgaaggggcaatgtgcaatgcattgcaagcagccatggaggaggctatgctcaacctcaatgaagagtcgtcgagccggcccaagcgtcgtcgacgctacatcaatcgtgatcgtgagtctgcccatgatcggcttcatcaagactacttcgccgatgactgtgtgtatcctccaaattactttcggcgcaggtatcgcatgaggcgacaactttttttgagtattatgctaagattaggtgaatactctccgtatttcacccaaagagaagatgctctgggtcgactcgggctctctcccctacaaaagtgcaccgcagctctgcgcttgttagcctatggatccgctgcagattcgatagatgagtacttaaagctagctagatcaactgcattagagtgtctagagaagttttgtgagggtattcattcattgttatagggaggagttctgtcgtcgatgagtacataataatcattagatttatgtaattttctattaattattatgtatttttaaatcgtcatgtaattttattttaattattacgcaatttgtaatttttaattcaataaaaaatattatgttgtgtgttttctgagcgttgaaataaatccgcgtgaattacttaattctgaaatagaaaagctgatgtggctatagcctgaggctgcagcctgtgcactggagcagcagaggcgagagtggaggcgagagctgacgtggcaggggcgagagggaggctgtgcactggactcagcctaatataaaagtcatctgtgtctccatcacttgttcgaacactagtcataaccttgtttacatgttcttaatgagtccaacatactttgttgggccttaatgtttgtccaaagagttggagaatgagaaaacccccttaaccctaactagggtagggactggtatatattgatagatgttgggcctggcccattatacaagggtgtgacaataattacaaggggctaaccccaaaaccctaggctggtactataacacaaagcccaccaaataatattattattattttttatcataagccttctctaaatcaatgaaaaccatgtctaggtccttcttgtgctctctatactgctccatcacttgttttattaagaaaataacttccatggttgacctttcgtcatagttattaaggtggtaaggcgaccgaccccctttttaacttttaagcggtaaagcgtaaggcgaggcgacaccttattatatagtaactagtcggttgcccgtgcgttgcgacggcttacagcaatacccacgtaaactatcttattgattgtctccgctctctgtataatattttgatttggctaactgatgttattgtttactccatccaatatgttttggtacaacacagccaatgaaatgagcgattagaagagagttcacaacgactgactgaacgaacaaagattatagaatgacataattccaccatacagagaccaaataagagaaaatatgtgagctcaagtttctaaaataagtcacatgaactcaaacttataaaaaatatagatcaaaatatggagtggttgctaaagtcagacatcaataaaaattggatgtgctccatataaattatgctacttcgtagcaattactaacttttaaaaccaacaaatagcctttcattttactgttagtgtgacaaatcattgttgctccatccaattcagcaacctcaaacaccatgtagtctattgcgccaatgtggtctcagaaacgacctaatgcttgcaagagccaagaacgtcgtaccgtgcttggctgtagcctcggcccgtagtgctggcccaacccgacacgattctatttttttgttttacaaaaaacgtatatacatatatacaatctatattcaatattaaaaacatttgagcattatgttctactggttagacagcttcactcagtatctcttgcccttttttccattagggcatgggttcgaacccacctcctgcactgtttttaatattttacgttgatttaatcaaatgggccgctgtggcccacaggcgctcctgtttttttaacattttacactgatttaatcaaataggccgacaggctaacgggccgctgtggcccacgagcgtctggcccgtgccgtgccgccgtttggccatctatatgtggaggtgtgttttgggatgtgggggttggttgcgcggaccggacgaacgtgcagcggattaatttgaaatagctgtgaggggttatttgtaaaaagatgatgcgtgatgaccgttgaaactggtgctttaagtatagtagagatataacaccttaatataaaatattagaccaaatattatttatataacatcgattcaaaattaataagctagcacaactataaggcctagtcgacccatttcaacctagtagaaatgagaaataggaaaaaaaggaaaaaaaatcctactacaaagcccaactaacctagcccaatagtgtagcccaacagttttaggttaaaacctacaatctcggaccaaaactcttcctcctctcctgcgcagccgctagtcgccagtcactgctctctctcccctacaactcctctctcctccctgcaccgcgtagctccttctctgtccctcaccgtagctcctcatttcctgactgaccagctatggcctcgcgccgccgccgccctccacagctcctctctccctaactagtcggctgggaccacgcgtcgccgtcgctgcggcctgtgcgcgtcgtcgcaacgcgctgacattaggtcaatacatccaaggagcgatgccttaactgggttcaaggcgccagagcgacgccttagcagatgaagcggacgccttaggctaatgagtaaggcgacttggacgctttacggctgacctcgccttactgcttaaactatgccttaacaaaattggttcatagaaatctttgttattcgtcttagatgatgctcgattactcgtagcttcatagtatggcggtatggcccatcaacttaattcctcgataattggtacaactttaaatatcttcgttattcttatagattgctaccaatatatttctccttcactcgtcggacatcttgttcaaccgtaagatgtggatgagcaacttgggtagccatactactactatgtccccgagacatctctatgcctcaattgggatactattatggtccattgccttacccttttcatcctttccaatccctcttcaacctcgaatcctacacacgaagcgtctattggtgtcagtgtcatccaactgaaaggttatgtccccattcttctcatttaacaatttgttaaagtactctcgccctctatgtttgatctcatcttccttcaacaagaggtgctcgtttcatccttaatgtacttaacttggttggagtctcttatctttctctcacggaccctaggtatcctatatatgtccttctccatcgtactcaaacgttgataaaaatcctcgtacgtcttaccctttaccacacttacaacttgctttgcggtcttctttggtaccttatacttctctttgttgtccacactcctgtcatggtataacatcatttcttctccttaatagcactttagacttccttgttcctccaccaagtatctttagctttgtatccactcggaccactccctttggttgctccacacacctgtgaggccacctttcgaatgcaagttgccatcttctcacacacgttgtttgcctcatcttcttccttctaagtgcccttttgatggtcttttctttgaggacttttgacgtctcctcttttagtttccaccactttgttctcgtaatcttggcttgtttatcactatgggcacacaaacctaaaaacgaaagaccgccaccacaagcttatgttgagagacaacacactttctaggtatcactttgcaatccaagcatgctcgattgtcctctctttttgtgaggacaatcaatttgactggagtattgaccactactatagtataggtcactaaatgggattctctctttctaaagaaaagtgttggctttcaacaggtcaaaagctatcacaaagtccaagacttcatgtcctaactgattcctactaccatacccaaaatctctatgaaccacctcgaaaccggcatatcttctagatagaaaggacaaaaatcatgtgttccctcagtagaagtgtgatttgcttcccataagagtctccaccaatcctcttttgtttcattgttcgcacaacttttccgaaatatgatcaaatttaggaaaatcagtactaataattgaactagagagatcatagagacccttagagcttgtttgggagcacggggattggaggggattgagggggctaaaatcccctttctattcaaaatttagcaaaggggatattttagccccctcaatcccctccaatccccgtgctcccaaacacgcccttaggggcactcatttgcacctttatccctcgagcatacgtgaaccatataggaataaaggatttgaactcttctaatctcttcctaaatatgatccatccaaaagactgaaactgatcaatgttggatttgcgtggtagcacccaacgacgggttgtcatatgatacttttccacagcctcctgttgtttgcaacttttccctggcatcataagtttgtctttattttgtcacagtggttttttgtacttagaagcatgcgttttgtagaatggcaataaaagagatgttgctattacttgaaatttttacctttgtcaaggatagattcacaatgaaccattttgacatttcctttttttcatgcaccagattttctgtaacattgacaaagtttctggtgattcaaacatggttattcagtacaaaaagaagcattgcatagatgaaagattctgtttcttccagggttgctgtgtctacttgcataatgcgcccttagtgtaagcttcatttactgtcaagtagcatgtctttcacatgatacatctcctcatttgtttttttcaccttttttcctggaggaatgcggactacaatgtaatatctgatcttgcactgaagagggtgaagcaggatctaacaatgcatggtggtcaagtctgcagcagtattgctccagctactcatttggtagtagtttcggttttacaggtctataactttgataacctgtacaagaggtactgagttattgctttagatttgctttgtaacttttgtgagcgaagggcaaatagaaaaactttatggtcgtccattggttgtttatgcagcttccctcccgctgaaagacgttatctacatgacaaaagattacatgttgtcagtaacaagtggttggaagattcagtggagaaacaaatgaagctctctgaaactgcttacagccttaaaccagatacactagaagaactagaaattaaaaggaggtaaccggtgattgcccacataacgacactttcaatattaaaaaaaatgcatatggttgtcaatcttctgtctgtttctaatttgtttcagtgaggaaaatgttcagcctccggagcataagtttgaggaacacaaggaggttgaaagatctcatgcggaaaatatgccaaggaaaaggagtaggccaaccagttcaagaactgcaagggctgctcctagagcagtccgccgaataaggcctagaagaggaaaccagaaagcaaaaataggtgatgttgaatctgaagaaagtggccccagcgaatgccaagatgatgaaaatttggacacagatgatacctctaagattgaagaaggtattaccaacaaaaacaaaggactccctgcacctgcttcaaaaccagcctggagaacaggggctacaaaaggaaatcagcatacaaaaatagatgacagcggatctgaagaaagtgggccttgtgaaacagcgcaagatgattacatctctaagatggaagtagataacattgataatgaccgtggaccaccgccaggtgctcagcttttcacgttgggggagcaagaggtcaaaggtgtcaaattgaacaccgtggaggagaaacaagacagccctttccagagaacaaccgctgctgaagcgatgagtagcacgcctggtgagaagatagaacaaatggctgatccgttgcacgccatgcttctggatatgttgccactcctgggccagaaaaggacagaagatacaagcaaggcgcccttggcgaaagctgagaaggatccacctgcgataggaagctccacatccaattctgagattctgttgccagatgctggaacatccggggttccagccccagagccaagtgcagctccaccaaagaagaaaaaagtgagttacagagatgtcgttagtgaacttctgaaagattggtgagcgagcttggtcagtggggatagcctgcagtctatgttttactcccgtaatcgctatctttgtaaataggacagcgccatctaagtaaccatgtttgtagggtcaccttggctgcttgtcgtgccctgccctctggagctcacttgttttgcctgttgagaattttgactgttaagcctaacaacactgacgttgagttggaccaatatgcacgcggaatgctaggattctacaaagtggaagtggaagcctgttgtccgctctctgcaattggttttggatctttgcactgcagccaatgttgtcgctttcgctgtatacgagaatgtggtctgagccgaagccgagaaagaggaagctctccgtttggcggcctcggcgtgtggtcgtcgtgcgctgtgccgtgccgggccgagtcggtttaccaccaaactggcgtgtgtctgaaacgaaaaggaggggaatggagtcatggagatttgtcgccgaatcgccgttatttcacgcttgtcggaccattcactgttgctcgatcgagtctcgactctcgactgtgcaagtcgttggattggacatttggaccacagcagagtctgtagaggtagtagcagtattcaccaacgtactgactggattattctctctcttttaaaagaaaccctgactggatttttcttc

SEQ ID NO: 76 - protein, 1208 aa, Zea mays
MAAKVRFGLLVAMFQAMSGDKSSAKKRGRLRAFLDRAYVPCGGRDDYFSALRLVLPGLDRERGSYGLKEAALAAVLVDALGIAKDSTDAVRLTNWRRGGGGRNAGNFSLVAAEILQRRQGITSGGLTIKEVNDALDRLATTENRSEKALILSNLIKKTNALEMKWLLMIILKDLKLGISEKSIFEEFHPDAQDLFNVTCDLKFVCEKLNDRSQRHKRQDIEIGKAVRPQLALRVRDSSVAWKKLHGKQVVAECKFDGDRIQIHKNGEEIHFFSRSFLDHTEYAPGMSKIIKENILVDRCILDGEMLVWDTVLNRFAEFGSNQEIAKAAREGLETDRQLCYVVFDILYAGDTSVIHQSLTERHQILQKVVKQLKGHLEILIPRRGLNVPRPSDEPCWSIIAHNAEDVDKFFKETIENRDEGIVLKDLDSKWEPGDRNGKWLKLKPDYIHAGADLDVIIIGGYYGSGRQGGEVAQFLVGLAVPSDDNSYPKRFLSFCRVGTGLSDEERDALVTKLNPYFRKNEYPKKPPKFYEVTNNSKERPDVWIESPDKSVIISVTSDIRTIKSEVFAAPYCLRFPRIQRVRYDKPWHECLDVQAFVDIVHSNNGTIQRVADDNSLKNDDTKHSRTNKKVEKCVSIIPSHFMKTDVSGLKGETLIFANLIFYFVNIPSSYNLEYFHKLVVENGGSFSMNLNDSVTHCIAAEKKGIKYQAALRQGRIIHYEWILDCCKEKHLLHLHPRYILFIADFARHKFPEEIDSYADYYYWDIEIADLKQIFCNIDKVSGDSNMVIQYKKKHCIDERFCFFQGCCVYLHNAPLVNADYNVISDLALKRVKQDLTMHGGQVCSSIAPATHLVVVSVLQVYNFDNLYKSFPPAERRYLHDKRLHVVSNKWLEDSVEKQMKLSETAYSLKPDTLEELEIKRSEENVQPPEHKFEEHKEVERSHAENMPRKRSRPTSSRTARAAPRAVRRIRPRRGNQKAKIGDVESEESGPSECQDDENLDTDDTSKIEEGITNKNKGLPAPASKPAWRTGATKGNQHTKIDDSGSEESGPCETAQDDYISKMEVDNIDNDRGPPPGAQLFTLGEQEVKGVKLNTVEEKQDSPFQRTTAAEAMSSTPGEKIEQMADPLHAMLLDMLPLLGQKRTEDTSKAPLAKAEKDPPAIGSSTSNSEILLPDAGTSGVPAPEPSAAPPKKKKVSYRDVVSELLKDW

SEQ ID NO: 77 - protein, 1046 aa, Zea mays
MKWLLMIILKDLKLGISEKSIFEEFHPDAQDLFNVTCDLKFVCEKLNDRSQRHKRQDIEIGKAVRPQLALRVRDSSVAWKKLHGKQVVAECKFDGDRIQIHKNGEEIHFFSRSFLDHTEYAPGMSKIIKENILVDRCILDGEMLVWDTVLNRFAEFGSNQEIAKAAREGLETDRQLCYVVFDILYAGDTSVIHQSLTERHQILQKVVKQLKGHLEILIPRRGLNVPRPSDEPCWSIIAHNAEDVDKFFKETIENRDEGIVLKDLDSKWEPGDRNGKWLKLKPDYIHAGADLDVIIIGGYYGSGRQGGEVAQFLVGLAVPSDDNSYPKRFLSFCRVGTGLSDEERDALVTKLNPYFRKNEYPKKPPKFYEVTNNSKERPDVWIESPDKSVIISVTSDIRTIKSEVFAAPYCLRFPRIQRVRYDKPWHECLDVQAFVDIVHSNNGTIQRVADDNSLKNDDTKHSRTNKKVEKCVSIIPSHFMKTDVSGLKGETLIFANLIFYFVNIPSSYNLEYFHKLVVENGGSFSMNLNDSVTHCIAAEKKGIKYQAALRQGRIIHYEWILDCCKEKHLLHLHPRYILFIADFARHKFPEEIDSYADYYYWDIEIADLKQIFCNIDKVSGDSNMVIQYKKKHCIDERFCFFQGCCVYLHNAPLVNADYNVISDLALKRVKQDLTMHGGQVCSSIAPATHLVVVSVLQVYNFDNLYKSFPPAERRYLHDKRLHVVSNKWLEDSVEKQMKLSETAYSLKPDTLEELEIKRSEENVQPPEHKFEEHKEVERSHAENMPRKRSRPTSSRTARAAPRAVRRIRPRRGNQKAKIGDVESEESGPSECQDDENLDTDDTSKIEEGITNKNKGLPAPASKPAWRTGATKGNQHTKIDDSGSEESGPCETAQDDYISKMEVDNIDNDRGPPPGAQLFTLGEQEVKGVKLNTVEEKQDSPFQRTTAAEAMSSTPGEKIEQMADPLHAMLLDMLPLLGQKRTEDTSKAPLAKAEKDPPAIGSSTSNSEILLPDAGTSGVPAPEPSAAPPKKKKVSYRDVVSELLKDW

SEQ ID NO: 78 - DNA, 2332 bp, Adenovirus 4
tatataagcaggtgcagacctgtgtggttagctcagagcggtatggagatttggacggttttggaagactttcacaagactaggcagctgctagagaacgcctcgaacggagtctcttacctgtggagattctgcttcggcggtgacctagctaagctagtctatagggccaaacaggattatagggaacaatttgaggatattttgagagagtgtcctggtctttttgacgctcttaacttgggccatcagtctcactttaaccagagaatttcaagagcccttgactttactactcctggcagaaccactgcagcagtagccttttttgcttttatttttgacaaatggagtcaagaaacccatttcagcagggattaccagctggatttcttagcagtagctttgtggagaacatggaagtgccagcgcctgaatgcaatctccggctacttgccggtacagccgctagacactctgaggatcctgagtctccagcagcaggaggatcaagaagagaatccgagagccggcctggaccctccggcggaggagtagctgacctgtttcctgaactgcaccgggtgctgactaggtcttcgagtggtcgggagaggggtattaagcgggagaggcatgatgagactaatcacagaattgaactgactgtgggtctgatgagccgcaagcgtccagaaacagtgtggtggtatgaggtgcagtcaactggcacagatgaggtgtcagtcatgcatgagagattttccctagaacaagtcaagacttgttggttggagcctgaggatgattgggaggtagccatcaggaattatgccaagctggctctgaggccagatagaaagtacaagattactaagctgataaatatcagaaatgcctgctacatctcagggaatggggctgaagtggagatctgtctccaggatagagtggctttcagatgctgcatgatgaatatgtacccgggagtggtggacatggatggggtcacctttatgaacatgaggttcaggggagatgggtataatgggacggtctttatggccaataccaagctgacagtgcatggatgctccttctttgggtttaataacacctgcatcgaggcttggggtcaggtcggtgttaaggggtgcagtttttcagccaactggatgggggtagtgggcaggaccaagagtatgctgtctgtgaagaaatgcttgtttgagaggtgccacctgggggtgatgagcgagggcgaagccagaatccgccactgtgcctctaccgagacgggctgttttgtgctgtgcaagggcaatgccaagatcaagcataatatgatctgtggagcctcggacgagcgcggctaccagatgctgacctgcgccggtgggaacagtcatatgctggccgccgtgcatgtggcttcccattcccgcaagccctggcctgagttcgagcacaatgtcatgaccaggtgcaatatgcatctgggggctcgccgaggcatgtttatgccctaccagtgcaacctgaattatgtaaaggtgctcctggagcccgatgtcatgtccagagtgagcctgacgggggtgtttgacatgaatgtggaagtgtggaagattctaagatatgatgaatacaagaccaggtgtcgagcctgcgagtgcggagggaagcatgccaggttccagcccgtgtgtgtggatgtgacggaggacctgcgacccgatcatttggtgttgtcctgcaccgggacggagttcggctccagtggggaagaatctgactagagtgagtagtgttttggggagggagaggacctgcataaggggcagaatgattaaaatctgtgcttttctgtgtgttgcagcagcatgagcggaaacggctcctttgagggaggggtattcagcccttatctgacggggcgtctcccctcctgggcgggagtgcgtcaaaatgtgatgggatccacggtggacggccggcccgtacagcccgcgaactcttcaaccctgacctatgcaaccctgagctcctcgtcggtggacgcagctgccgccgcagctgctgcttctgccgccagcgccgtgcgcggaatggccatgggcgccggctattacggcactctggtggccaactcgagttccactaataatcccgccagcctgaacgaggagaagctgctgctgttgatggcccagctcgaggccttgacccagcgcctgggcgagctgacccagcaggtggctcagctgcaggagcagacgcgggccgcggttgccacggtgaaatccaaataaaaaatgaatcaataaataaa

SEQ ID NO: 79 - protein, 483 aa, Adenovirus 4
MESRNPFQQGLPAGFLSSSFVENMEVPAPECNLRLLAGTAARHSEDPESPAAGGSRRESESRPGPSGGGVADLFPELHRVLTRSSSGRERGIKRERHDETNHRIELTVGLMSRKRPETVWWYEVQSTGTDEVSVMHERFSLEQVKTCWLEPEDDWEVAIRNYAKLALRPDRKYKITKLINIRNACYISGNGAEVEICLQDRVAFRCCMMNMYPGVVDMDGVTFMNMRFRGDGYNGTVFMANTKLTVHGCSFFGFNNTCIEAWGQVGVKGCSFSANWMGVVGRTKSMLSVKKCLFERCHLGVMSEGEARIRHCASTETGCFVLCKGNAKIKHNMICGASDERGYQMLTCAGGNSHMLAAVHVASHSRKPWPEFEHNVMTRCNMHLGARRGMFMPYQCNLNYVKVLLEPDVMSRVSLTGVFDMNVEVWKILRYDEYKTRCRACECGGKHARFQPVCVDVTEDLRPDHLVLSCTGTEFGSSGEESD

SEQ ID NO: 80 - DNA, 2691 bp, Adenovirus 4
tatatattgagtacagaagcgggcagttaggttagagctcagctttttctctgactcttgcgcctgccgtgctcggtaagctatggacgctcaggttttgtatgtgtttctggagggagcgggggctttgctgcctgtgcagaaggggagtaattacattttttacgcacctgccaattttgtgcttcatccgcatggggtcgctttgctggaattaagattaagcattgtagtgcctcaaggctttataggtcgctttttttcactcacggacgccaatgttcccggagtgtatgcttcttctcgaatcatccatgccggccaccgggaaggtctgtcggtgatgctttttaatcataatgtcagcttctacaatggtcgcgccggagaccctgtagcctgcctggtgttggaaagagtgatttatccacctgttcgccaggctagcatggtttaatattgcatgtttattttttgttctacagatcaccaaaaacactaaccatgctggaacgtactccttgcacttattccatcgttgttcctgaggctctaaacgtgcacctagacgacttttcttttgttaattttcttaaaaattgcttgcctgattttctgtccagttatctggaagatatcaccgggtctagccagcatgcttatttcaatcttacatttggcaatgctcactggggaggacttcgctttatctgtaatgtggcttgcccttctcttgttcctggtggtcctatggctaaaaatttcggagaagatatgaatgagtacatacagttactgctaagggaggagcttagggattgcggcagagcaattgatattccacttgttaatctactacaggtgaaccaggagcagaatctgttggaattatgagggtgtgcttaagaatgccggtggagggcgctctgcgcgagctttttatcatggctggcttggatttacctcaggaactaatacgaatcattcaaggctggaaaaatgaaaattatctaggcatggtgcaggagtgtaatatgatgattgaggaattagaaaacgctcccgctttcgctgtcctcttgtttctggatgtgcgcgtggaggctttgctggaagccaccgtggaacatctcgagaaccgtgttacctttgacctggctgttattttccaccaacacagtgggggcgagaggtgccacctccgggacctgcattttgaagtgttccgagaccgtttggaataaagttaatcatggttcttcctgttcttccctcccccgccgtcaccgaaacccaacaaaattgcatcatctggctgggtttggcccattccaccgtggttgatgtaatcagagccatcagggcggatgggattttcatcacccaagaggctcaggagatactgcacgttctgagggagtggctgttctataacttcaacattgagcgctcgaagcgccgagaccgtcgccgacgagcggtgtgcagtgcccggaccaggttctgctttgtgaaatacgaaaatgtccggaaacagctccatcatgacacgatccagaacacgattagcgttatctcgccatcatccgtaccaaccgccggccaccttacctcgctgtgaggagaccgagagccgcgcttctctggtggaggatcatccggtgctgcctgattgcgataccctgtccatgcacaatgtaagttccgtgcgaggattgccctgttcggccgggttcactgtcctgcaagagttccctgtgccctgggatatggtcctgacccccgaggaattgagagtgctgaagacatgcatgagcgtgtgcctgtgctgtgccaacatagacttgtttagttcccagttgatccacggtcgcgagcggtgggtgatccactgccattgccagaacccggggtccctgcgctgcatggcgggcgggacggtacttgccatctggttccgcagaattatccagggctgcatgttcaaccagcgggtgatgtggtaccgggaggtggtgaacctgcacatgcccaaggagatcatgtacatgggcagtgtgttctggaggggacgccacctgatttacatcaggatctggtacgatggacatgtgggcagcatagttccacaaatgagttttggctggagcacgttgaactatggactgttgaacaacttggtggtgctgtgctgcacgtactgctccgacctgagtgagatccgcatccgctgctgcgcccgccgtaccaggcgactgatgctcagggccattggcatcatgcgcagggagtccctggacccggaccccttgagtagcagcttgacggagcggcgcagacagcgactgctgcggggcctgatgcgccacaaccgcccgatcccgtttgcggattatgattctcatcgctcttattccagataactgtgattccaatcaccgaggacagccctcagctgttgaactgtgaggtgcagatgcaggagtgcccggagggtttcatctccttgaccgacccgagactgtctcgctctgaaactgtgtggaatgtggagatcaaaaccatgtccattaccaatagcattcagatgtttaaggctgtgcgtggggagaggatagtgtattccatgagatgggagggtggagggaaaataactactcgaatcctgtgaaaaactgttgaatcaataaa

SEQ ID NO: 81 - protein, 299 aa, Adenovirus 4
MSGNSSIMTRSRTRLALSRHHPYQPPATLPRCEETESRASLVEDHPVLPDCDTLSMHNVSSVRGLPCSAGFTVLQEFPVPWDMVLTPEELRVLKTCMSVCLCCANIDLFSSQLIHGRERWVIHCHCQNPGSLRCMAGGTVLAIWFRRIIQGCMFNQRVMWYREVVNLHMPKEIMYMGSVFWRGRHLIYIRIWYDGHVGSIVPQMSFGWSTLNYGLLNNLVVLCCTYCSDLSEIRIRCCARRTRRLMLRAIGIMRRESLDPDPLSSSLTERRRQRLLRGLMRHNRPIPFADYDSHRSYSR

SEQ ID NO: 82 - DNA, 17489 bp, Artificial Sequence
  gene targeting construct
  misc_feature (16367)..(16367): n is a, c, g, or t
agtactttgatccaacccctccgctgctatagtgcagtcggcttctgacgttcagtgcagccgtcttctgaaaacgacatgtcgcacaagtcctaagttacgcgacaggctgccgccctgcccttttcctggcgttttcttgtcgcgtgttttagtcgcataaagtagaatacttgcgactagaaccggagacattacgccatgaacaagagcgccgccgctggcctgctgggctatgcccgcgtcagcaccgacgaccaggacttgaccaaccaacgggccgaactgcacgcggccggctgcaccaagctgttttccgagaagatcaccggcaccaggcgcgaccgcccggagctggccaggatgcttgaccacctacgccctggcgacgttgtgacagtgaccaggctagaccgcctggcccgcagcacccgcgacctactggacattgccgagcgcatccaggaggccggcgcgggcctgcgtagcctggcagagccgtgggccgacaccaccacgccggccggccgcatggtgttgaccgtgttcgccggcattgccgagttcgagcgttccctaatcatcgaccgcacccggagcgggcgcgaggccgccaaggcccgaggcgtgaagtttggcccccgccctaccctcaccccggcacagatcgcgcacgcccgcgagctgatcgaccaggaaggccgcaccgtgaaagaggcggctgcactgcttggcgtgcatcgctcgaccctgtaccgcgcacttgagcgcagcgaggaagtgacgcccaccgaggccaggcggcgcggtgccttccgtgaggacgcattgaccgaggccgacgccctggcggccgccgagaatgaacgccaagaggaacaagcatgaaaccgcaccaggacggccaggacgaaccgtttttcattaccgaagagatcgaggcggagatgatcgcggccgggtacgtgttcgagccgcccgcgcacgtctcaaccgtgcggctgcatgaaatcctggccggtttgtctgatgccaagctggcggcctggccggccagcttggccgctgaagaaaccgagcgccgccgtctaaaaaggtgatgtgtatttgagtaaaacagcttgcgtcatgcggtcgctgcgtatatgatgcgatgagtaaataaacaaatacgcaaggggaacgcatgaaggttatcgctgtacttaaccagaaaggcgggtcaggcaagacgaccatcgcaacccatctagcccgcgccctgcaactcgccggggccgatgttctgttagtcgattccgatccccagggcagtgcccgcgattgggcggccgtgcgggaagatcaaccgctaaccgttgtcggcatcgaccgcccgacgattgaccgcgacgtgaaggccatcggccggcgcgacttcgtagtgatcgacggagcgccccaggcggcggacttggctgtgtccgcgatcaaggcagccgacttcgtgctgattccggtgcagccaagcccttacgacatatgggccaccgccgacctggtggagctggttaagcagcgcattgaggtcacggatggaaggctacaagcggcctttgtcgtgtcgcgggcgatcaaaggcacgcgcatcggcggtgaggttgccgaggcgctggccgggtacgagctgcccattcttgagtcccgtatcacgcagcgcgtgagctacccaggcactgccgccgccggcacaaccgttcttgaatcagaacccgagggcgacgctgcccgcgaggtccaggcgctggccgctgaaattaaatcaaaactcatttgagttaatgaggtaaagagaaaatgagcaaaagcacaaacacgctaagtgccggccgtccgagcgcacgcagcagcaaggctgcaacgttggccagcctggcagacacgccagccatgaagcgggtcaactttcagttgccggcggaggatcacaccaagctgaagatgtacgcggtacgccaaggcaagaccattaccgagctgctatctgaatacatcgcgcagctaccagagtaaatgagcaaatgaataaatgagtagatgaattttagcggctaaaggaggcggcatggaaaatcaagaacaaccaggcaccgacgccgtggaatgccccatgtgtggaggaacgggcggttggccaggcgtaagcggctgggttgtctgccggccctgcaatggcactggaacccccaagcccgaggaatcggcgtgacggtcgcaaaccatccggcccggtacaaatcggcgcggcgctgggtgatgacctggtggagaagttgaaggccgcgcaggccgcccagcggcaacgcatcgaggcagaagcacgccccggtgaatcgtggcaagcggccgctgatcgaatccgcaaagaatcccggcaaccgccggcagccggtgcgccgtcgattaggaagccgcccaagggcgacgagcaaccagattttttcgttccgatgctctatgacgtgggcacccgcgatagtcgcagcatcatggacgtggccgttttccgtctgtcgaagcgtgaccgacgagctggcgaggtgatccgctacgagcttccagacgggcacgtagaggtttccgcagggccggccggcatggccagtgtgtgggattacgacctggtactgatggcggtttcccatctaaccgaatccatgaaccgataccgggaagggaagggagacaagcccggccgcgtgttccgtccacacgttgcggacgtactcaagttctgccggcgagccgatggcggaaagcagaaagacgacctggtagaaacctgcattcggttaaacaccacgcacgttgccatgcagcgtacgaagaaggccaagaacggccgcctggtgacggtatccgagggtgaagccttgattagccgctacaagatcgtaaagagcgaaaccgggcggccggagtacatcgagatcgagctagctgattggatgtaccgcgagatcacagaaggcaagaacccggacgtgctgacggttcaccccgattactttttgatcgatcccggcatcggccgttttctctaccgcctggcacgccgcgccgcaggcaaggcagaagccagatggttgttcaagacgatctacgaacgcagtggcagcgccggagagttcaagaagttctgtttcaccgtgcgcaagctgatcgggtcaaatgacctgccggagtacgatttgaaggaggaggcggggcaggctggcccgatcctagtcatgcgctaccgcaacctgatcgagggcgaagcatccgccggttcctaatgtacggagcagatgctagggcaaattgccctagcaggggaaaaaggtcgaaaaggtctctttcctgtggatagcacgtacattgggaacccaaagccgtacattgggaaccggaacccgtacattgggaacccaaagccgtacattgggaaccggtcacacatgtaagtgactgatataaaagagaaaaaaggcgatttttccgcctaaaactctttaaaacttattaaaactcttaaaacccgcctggcctgtgcataactgtctggccagcgcacagccgaagagctgcaaaaagcgcctacccttcggtcgctgcgctccctacgccccgccgcttcgcgtcggcctatcgcggccgctggccgctcaaaaatggctggcctacggccaggcaatctaccagggcgcggacaagccgcgccgtcgccactcgaccgccggcgcccacatcaaggcaccctgcctcgcgcgtttcggtgatgacggtgaaaacctctgacacatgcagctcccggagacggtcacagcttgtctgtaagcggatgccgggagcagacaagcccgtcagggcgcgtcagcgggtgttggcgggtgtcggggcgcagccatgacccagtcacgtagcgatagcggagtgtatactggcttaactatgcggcatcagagcagattgtactgagagtgcaccatatgcggtgtgaaataccgcacagatgcgtaaggagaaaataccgcatcaggcgctcttccgcttcctcgctcactgactcgctgcgctcggtcgttcggctgcggcgagcggtatcagctcactcaaaggcggtaatacggttatccacagaatcaggggataacgcaggaaagaacatgtgagcaaaaggccagcaaaaggccaggaaccgtaaaaaggccgcgttgctggcgtttttccataggctccgcccccctgacgagcatcacaaaaatcgacgctcaagtcagaggtggcgaaacccgacaggactataaagataccaggcgtttccccctggaagctccctcgtgcgctctcctgttccgaccctgccgcttaccggatacctgtccgcctttctcccttcgggaagcgtggcgctttctcatagctcacgctgtaggtatctcagttcggtgtaggtcgttcgctccaagctgggctgtgtgcacgaaccccccgttcagcccgaccgctgcgccttatccggtaactatcgtcttgagtccaacccggtaagacacgacttatcgccactggcagcagccactggtaacaggattagcagagcgaggtatgtaggcggtgctacagagttcttgaagtggtggcctaactacggctacactagaaggacagtatttggtatctgcgctctgctgaagccagttaccttcggaaaaagagttggtagctcttgatccggcaaacaaaccaccgctggtagcggtggtttttttgtttgcaagcagcagattacgcgcagaaaaaaaggatctcaagaagatcctttgatcttttctacggggtctgacgctcagtggaacgaaaactcacgttaagggattttggtcatgcatgatatatctcccaatttgtgtagggcttattatgcacgcttaaaaataataaaagcagacttgacctgatagtttggctgtgagcaattatgtgcttagtgcatctaatcgcttgagttaacgccggcgaagcggcgtcggcttgaacgaatttctagctagacattatttgccgactaccttggtgatctcgcctttcacgtagtggacaaattcttccaactgatctgcgcgcgaggccaagcgatcttcttcttgtccaagataagcctgtctagcttcaagtatgacgggctgatactgggccggcaggcgctccattgcccagtcggcagcgacatccttcggcgcgattttgccggttactgcgctgtaccaaatgcgggacaacgtaagcactacatttcgctcatcgccagcccagtcgggcggcgagttccatagcgttaaggtttcatttagcgcctcaaatagatcctgttcaggaaccggatcaaagagttcctccgccgctggacctaccaaggcaacgctatgttctcttgcttttgtcagcaagatagccagatcaatgtcgatcgtggctggctcgaagatacctgcaagaatgtcattgcgctgccattctccaaattgcagttcgcgcttagctggataacgccacggaatgatgtcgtcgtgcacaacaatggtgacttctacagcgcggagaatctcgctctctccaggggaagccgaagtttccaaaaggtcgttgatcaaagctcgccgcgttgtttcatcaagccttacggtcaccgtaaccagcaaatcaatatcactgtgtggcttcaggccgccatccactgcggagccgtacaaatgtacggccagcaacgtcggttcgagatggcgctcgatgacgccaactacctctgatagttgagtcgatacttcggcgatcaccgcttcccccatgatgtttaactttgttttagggcgactgccctgctgcgtaacatcgttgctgctccataacatcaaacatcgacccacggcgtaacgcgcttgctgcttggatgcccgaggcatagactgtaccccaaaaaaacatgtcataacaagaagccatgaaaaccgccactgcgccgttaccaccgctgcgttcggtcaaggttctggaccagttgcgtgacggcagttacgctacttgcattacagcttacgaaccgaacgaggcttatgtccactgggttcgtgcccgaattgatcacaggcagcaacgctctgtcatcgttacaatcaacatgctaccctccgcgagatcatccgtgtttcaaacccggcagcttagttgccgttcttccgaatagcatcggtaacatgagcaaagtctgccgccttacaacggctctcccgctgacgccgtcccggactgatgggctgcctgtatcgagtggtgattttgtgccgagctgccggtcggggagctgttggctggctggtggcaggatatattgtggtgtaaacaaattgacgcttagacaacttaataacacattgcggacgtttttaatgtactgaattaacgccgaattgctctagccaatacgcaaaccgcctctccccgcgcgttggccgattcattaatgcagctggcacgacaggtttcccgactggaaagcgggcagtgagcgcaacgcaattaatgtgagttagctcactcattaggcaccccaggctttacactttatgcttccggctcgtatgttgtgtggaattgtgagcggataacaatttcacacaggaaacagctatgacatgattacgaattcaaaaattacggatatgaatataggcatatccgtatccgaattatccgtttgacagctagcaacgattgtacaattgcttctttaaaaaaggaagaaagaaagaaagaaaagaatcaacatcagcgttaacaaacggccccgttacggcccaaacggtcatatagagtaacggcgttaagcgttgaaagactcctatcgaaatacgtaaccgcaaacgtgtcatagtcagatcccctcttccttcaccgcctcaaacacaaaaataatcttctacagcctatatatacaacccccccttctatctctcctttctcacaattcatcatctttctttctctacccccaattttaagaaatcctctcttctcctcttcattttcaaggtaaatctctctctctctctctctctctgttattccttgttttaattaggtatgtattattgctagtttgttaatctgcttatcttatgtatgccttatgtgaatatctttatcttgttcatctcatccgtttagaagctataaatttgttgatttgactgtgtatctacacgtggttatgtttatatctaatcagatatgaatttcttcatattgttgcgtttgtgtgtaccaatccgaaatcgttgatttttttcatttaatcgtgtagctaattgtacgtatacatatggatctacgtatcaattgttcatctgtttgtgtttgtatgtatacagatctgaaaacatcacttctctcatctgattgtgttgttacatacatagatatagatctgttatatcattttttttattaattgtgtatatatatatgtgcatagatctggattacatgattgtgattatttacatgattttgttatttacgtatgtatatatgtagatctggactttttggagttgttgacttgattgtatttgtgtgtgtatatgtgtgttctgatcttgatatgttatgtatgtgcagcgaattcggcgcgccatggataagaagtactctatcggactcgatatcggaactaactctgtgggatgggctgtgatcaccgatgagtacaaggtgccatctaagaagttcaaggttctcggaaacaccgataggcactctatcaagaaaaaccttatcggtgctctcctcttcgattctggtgaaactgctgaggctaccagactcaagagaaccgctagaagaaggtacaccagaagaaagaacaggatctgctacctccaagagatcttctctaacgagatggctaaagtggatgattcattcttccacaggctcgaagagtcattcctcgtggaagaagataagaagcacgagaggcaccctatcttcggaaacatcgttgatgaggtggcataccacgagaagtaccctactatctaccacctcagaaagaagctcgttgattctactgataaggctgatctcaggctcatctacctcgctctcgctcacatgatcaagttcagaggacacttcctcatcgagggtgatctcaaccctgataactctgatgtggataagttgttcatccagctcgtgcagacctacaaccagcttttcgaagagaaccctatcaacgcttcaggtgtggatgctaaggctatcctctctgctaggctctctaagtcaagaaggcttgagaacctcattgctcagctccctggtgagaagaagaacggacttttcggaaacttgatcgctctctctctcggactcacccctaacttcaagtctaacttcgatctcgctgaggatgcaaagctccagctctcaaaggatacctacgatgatgatctcgataacctcctcgctcagatcggagatcagtacgctgatttgttcctcgctgctaagaacctctctgatgctatcctcctcagtgatatcctcagagtgaacaccgagatcaccaaggctccactctcagcttctatgatcaagagatacgatgagcaccaccaggatctcacacttctcaaggctcttgttagacagcagctcccagagaagtacaaagagattttcttcgatcagtctaagaacggatacgctggttacatcgatggtggtgcatctcaagaagagttctacaagttcatcaagcctatcctcgagaagatggatggaaccgaggaactcctcgtgaagctcaatagagaggatcttctcagaaagcagaggaccttcgataacggatctatccctcatcagatccacctcggagagttgcacgctatccttagaaggcaagaggatttctacccattcctcaaggataacagggaaaagattgagaagattctcaccttcagaatcccttactacgtgggacctctcgctagaggaaactcaagattcgcttggatgaccagaaagtctgaggaaaccatcaccccttggaacttcgaagaggtggtggataagggtgctagtgctcagtctttcatcgagaggatgaccaacttcgataagaaccttccaaacgagaaggtgctccctaagcactctttgctctacgagtacttcaccgtgtacaacgagttgaccaaggttaagtacgtgaccgagggaatgaggaagcctgcttttttgtcaggtgagcaaaagaaggctatcgttgatctcttgttcaagaccaacagaaaggtgaccgtgaagcagctcaaagaggattacttcaagaaaatcgagtgcttcgattcagttgagatttctggtgttgaggataggttcaacgcatctctcggaacctaccacgatctcctcaagatcattaaggataaggatttcttggataacgaggaaaacgaggatatcttggaggatatcgttcttaccctcaccctctttgaagatagagagatgattgaagaaaggctcaagacctacgctcatctcttcgatgataaggtgatgaagcagttgaagagaagaagatacactggttggggaaggctctcaagaaagctcattaacggaatcagggataagcagtctggaaagacaatccttgatttcctcaagtctgatggattcgctaacagaaacttcatgcagctcatccacgatgattctctcacctttaaagaggatatccagaaggctcaggtttcaggacagggtgatagtctccatgagcatatcgctaacctcgctggatctcctgcaatcaagaagggaatcctccagactgtgaaggttgtggatgagttggtgaaggtgatgggaaggcataagcctgagaacatcgtgatcgaaatggctagagagaaccagaccactcagaagggacagaagaactctagggaaaggatgaagaggatcgaggaaggtatcaaagagcttggatctcagatcctcaaagagcaccctgttgagaacactcagctccagaatgagaagctctacctctactacctccagaacggaagggatatgtatgtggatcaagagttggatatcaacaggctctctgattacgatgttgatcatatcgtgccacagtcattcttgaaggatgattctatcgataacaaggtgctcaccaggtctgataagaacaggggtaagagtgataacgtgccaagtgaagaggttgtgaagaaaatgaagaactattggaggcagctcctcaacgctaagctcatcactcagagaaagttcgataacttgactaaggctgagaggggaggactctctgaattggataaggcaggattcatcaagaggcagcttgtggaaaccaggcagatcactaagcacgttgcacagatcctcgattctaggatgaacaccaagtacgatgagaacgataagttgatcagggaagtgaaggttatcaccctcaagtcaaagctcgtgtctgatttcagaaaggatttccaattctacaaggtgagggaaatcaacaactaccaccacgctcacgatgcttaccttaacgctgttgttggaaccgctctcatcaagaagtatcctaagctcgagtcagagttcgtgtacggtgattacaaggtgtacgatgtgaggaagatgatcgctaagtctgagcaagagatcggaaaggctaccgctaagtatttcttctactctaacatcatgaatttcttcaagaccgagattaccctcgctaacggtgagatcagaaagaggccactcatcgagacaaacggtgaaacaggtgagatcgtgtgggataagggaagggatttcgctaccgttagaaaggtgctctctatgccacaggtgaacatcgttaagaaaaccgaggtgcagaccggtggattctctaaagagtctatcctccctaagaggaactctgataagctcattgctaggaagaaggattgggaccctaagaaatacggtggtttcgattctcctaccgtggcttactctgttctcgttgtggctaaggttgagaagggaaagagtaagaagctcaagtctgttaaggaacttctcggaatcactatcatggaaaggtcatctttcgagaagaacccaatcgatttcctcgaggctaagggatacaaagaggttaagaaggatctcatcatcaagctcccaaagtactcactcttcgaactcgagaacggtagaaagaggatgctcgcttctgctggtgagcttcaaaagggaaacgagcttgctctcccatctaagtacgttaactttctttacctcgcttctcactacgagaagttgaagggatctccagaagataacgagcagaagcaacttttcgttgagcagcacaagcactacttggatgagatcatcgagcagatctctgagttctctaaaagggtgatcctcgctgatgcaaacctcgataaggtgttgtctgcttacaacaagcacagagataagcctatcagggaacaggcagagaacatcatccatctcttcacccttaccaacctcggtgctcctgctgctttcaagtacttcgatacaaccatcgataggaagagatacacctctaccaaagaagtgctcgatgctaccctcatccatcagtctatcactggactctacgagactaggatcgatctctcacagctcggtggtgattcaagggctgatcctaagaagaagaggaaggtttgaggcgcgccgagctccaggcctcccagctttcgtccgtatcatcggtttcgacaacgttcgtcaagttcaatgcatcagtttcattgcccacacaccagaatcctactaagtttgagtattatggcattggaaaagctgttttcttctatcatttgttctgcttgtaatttactgtgttctttcagtttttgttttcggacatcaaaatgcaaatggatggataagagttaataaatgatatggtccttttgttcattctcaaattattattatctgttgtttttactttaatgggttgaatttaagtaagaaaggaactaacagtgtgatattaaggtgcaatgttagacatataaaacagtctttcacctctctttggttatgtcttgaattggtttgtttcttcacttatctgtgtaatcaagtttactatgagtctatgatcaagtaattatgcaatcaagttaagtacagtataggcttgagctccctaggctttttttcttcttcttcgttcatacagtttttttttgtttatcagcttacattttcttgaaccgtagctttcgttttcttctttttaactttccattcggagtttttgtatcttgtttcatagtttgtcccaggattagaatgattaggcatcgaaccttcaagaatttgattgaataaaacatcttcattcttaagatatgaagataatcttcaaaaggcccctgggaatctgaaagaagagaagcaggcccatttatatgggaaagaacaatagtatttcttatataggcccatttaagttgaaaacaatcttcaaaagtcccacatcgcttagataagaaaacgaagctgagtttatatacagctagagtcgaagtagtgattgcgtatcttcggccatgaagcgttttagagctagaaatagcaagttaaaataaggctagtccgttatcaacttgaaaaagtggcaccgagtcggtgctttttttctagacccagctttcttgtacaaagttggcattacctaggcccgggcctgaggttgtttccacgtatcttcggccatgaagctggagggtaatagaaacacgagagaacaaggcaaaaccaaatacgcccctagtattctacagatgtcgactggataattacaaaagatttcaataaacagtactaattaatttctagtggtgagtttttgtaaatatctacttcttccaattaccagctgctatataaatccccttctctgtttctcttttcttacatcacaatcacacaaaactaacaaaagatcaaaagcaagttcttcactgttgataatgtctaccaccggacagattattcgatgcaaaggttttctttttattctgtctttttccaaatatttattgatcggttacatttctgttgaggtttttgttatgaatccacaatttctatgttgaattaacaaaacctgtgtcgtttttttgtggtggttgcagctgctgtggcatgggaagccggaaagccactggtgatcgaggaagtggaggttgctccaccgcagaaacacgaagttcgtatcaagattctcttcacttctctctgtcacaccgatgtttacttctgggaagctaaggtagagtaatcaatttattacactccaaattcataatcaagttctaatttttttagaattctaattttttatctaaaaaaattcaacctttttgattccacagggacaaacaccgttgtttccacgtatcttcggccatacgcgtccttgaaaccaaattaacatagggtttttatttaaataaaagtttaaccttctttttaaaaaattgttcatagtgtcatgtcagaacaagagctacaaatcacacatagcatgcataagcggagctatgatgagtggtattgttttgttcgtcacttgtcactcttttccaacacataatcccgacaacaacgtaagagcatctctctctctccacacacactcatgcatgcatgcattcttacacgtgattgccatgcaaatctcctttctcacctataaatacaaaccaacccttcactacactcttcactcaaaccaaaacaagaaaacatacacaaatagcaaaacaagggcgaattctcaacacaacatatacaaaacaaacgaatctcaagcaatcaagcattctacttctattgcagcaatttaaatcatttcttttaaagcaaaagctattttctgaaaattttcaccatttacgaacgatagccatggtgaagactaatctttttctctttttcatcttttcacttctcctatcattatcctcggccgacatggtgagcaagggcgaggagctgttcaccggggtggtgcccatcctggtcgagctggacggcgacgtaaacggccacaagttcagcgtgtccggcgagggcgagggcgatgccacctacggcaagctgaccctgaagttcatctgcaccaccggcaagctgcccgtgccctggcccaccctcgtgaccaccctgacctacggcgtgcagtgcttcagccgctaccccgaccacatgaagcagcacgacttcttcaagtccgccatgcccgaaggctacgtccaggagcgcaccatcttcttcaaggacgacggcaactacaagacccgcgccgaggtgaagttcgagggcgacaccctggtgaaccgcatcgagctgaagggcatcgacttcaaggaggacggcaacatcctggggcacaagctggagtacaactacaacagccacaacgtctatatcatggccgacaagcagaagaacggcatcaaggtgaacttcaagatccgccacaacatcgaggacggcagcgtgcagctcgccgaccactaccagcagaacacccccatcggcgacggccccgtgctgctgcccgacaaccactacctgagcacccagtccgccctgagcaaagaccccaacgagaagcgcgatcacatggtcctgctggagttcgtgaccgccgccgggatcactctcggcatggacgagctgtacaaggacgagctgtaagcgccgcccggctgcatcgctgaaatcaccagtctctctctacaaatctatctctctctataataatgtgtgagtagttcccagataagggaattagggttcttatagggtttcgctcatgtgttgagcatataagaaacccttagtatgtatttgtatttgtaaaatacttctatcaataaaatttctaattcctaaaaccaaaaaatccagtggtacgtcgacggaagctggagggtaatagaaacactaatcttctttgcttcgttttggatatttttaaggttttagagattcaaggtcgttttttttgttgttgtgtaggattgttgagagtgttggagaaggagtgactgatcttcagccaggagatcatgtgttgccgatctttaccggagaatgtggggagtgtcgtcattgccactcggaggaatcaaacatgtgtgatcttctcaggatcaacaccgagcgaggagggatgattcacgatggtgaatcaagattctccattaatggcaaaccaatttaccatttccttgggacttccacgttcagtgagtacacagtggttcactctggtcaggttgctaagatcaatccggatgctcctcttgacaaggtctgtattgtcagttgtggtttgtctactgggttaggagcaactttgaatgtggctaaacccaagaaaggtcaaagtgttgccatttttggtcttggtgctgttggtttaggcgctgcagaaggtgctagaatcgctggtgcttctaggatcatcggtgttgattttaactctaaaagattcgaccaaggtattcaaaaagatgatagtctgtttttgactatgttcttctataatctcccttcacttacattgaatttgatatgttattggcagctaattgtttccacgtatcttcggccatgaagctggagggtaatagaaacagacgtccggaccgactagtggatcctctagagtcgacctgcaggcatgcaagcttcttcgtcaacatggtggagcacgacacgcttgtctactccaaaaatatcaaagatacagtctcagaagaccaaagggcaattgagacttttcaacaaagggtaatatccggaaacctcctcggattccattgcccagctatctgtcactttattgtgaagatagtggaaaaggaaggtggctcctacaaatgccatcattgcgataaaggaaaggccatcgttgaagatgcctctgccgacagtggtcccaaagatggacccccacccacgaggagcatcgtggaaaaagaagacgttccaaccacgtcttcaaagcaagtggattgatgtgatatctccactgacgtaagggatgacgcacaatcaatcccactatccttcgcaagacccttttaagggggaagttcatttcatttggagaggacacgctgaaatcaccagtctctctgtacaaatcnatctctctctataatattgtgtaagtagttcccagataagggaattagggttcttatagggtttcgctcagctgttgagcatataagaaacccttagtcgatagatctgttggggatctaccatgagcccagaacgacgcccggccgacatccgccgtgccaccgaggcggacatgccggcggtctgcaccatcgtcaaccactacatcgagacaagcacggtcaacttccgtaccgagccgcaggaaccgcaggagtggacggacgacctcgtccgtctgcgggagcgctatccctggctcgtcgccgaggtggacggcgaggtcgccggcatcgcctacgcgggcccctggaaggcacgcaacgcctacgactggacggccgagtcgaccgtgtacgtctccccccgccaccagcggacgggactgggctccacgctctacacccacctgctgaagtccctggaggcacagggcttcaagagcgtggtcgctgtcatcgggctgcccaacgacccgagcgtgcgcatgcacgaggcgctcggatatgccccccgcggcatgctgcgggcggccggcttcaagcacgggaactggcatgacgtgggtttctggcagctggacttcagcctgccggtaccgccccgtccggtcctgcccgtcaccgagatctgatgacccaacttagtatgtatttgtatttgtaaaatacttctatcaataaaatttctaattcctaaaaccaaaatccaggggtaccgaacaagcttggcactggccgtcgttttacaacgtcgtgactgggaaaaccctggcgttacccaacttaatcgccttgcagcacatccccctttcgccagctggcgtaatagcgaagaggcccgcaccgatcgcccttcccaacagttgcgcagcctgaatggcgaatgagcttgagcttggatcagattgtcgtttcccgccttcagtttaaactatcagtgtttgacaggatatattggcgggtaaacctaagagaaaagagcgtttattagaataacggatatttaaaagggcgtgaaaaggtttatccgttcgtccatttgtatgtgcatgccaaccacagggttcccctcgggatcaa
